United States Patent Application Publication US 2025/0195589 A1 - sequence listing, part 15

SEQ ID NO: 24 - DNA, 2517448 bp, Lactobacillus crispatus
  source 1..2517448: mol_type = genomic DNA
ttgttcgacattaataaattttgggaacactttaatgacgagatgcgtgctcgtttcaacgaagttgcctacaatgcatggttcaaaaatactaaacctatttcatataatggaaaaacacatgaattaaaaattttagttcaaaatcctgtttctaaaggttactgggaaaagaatctatcttctcaattgattcaatctgcctacggttatgccgacatcgagatcttacctgtatttaaaatatctgaagatgcggatattacagaaaggatcgtaacacctgcgccaaagcgtgatgcgcaagttcaacagcctaatttgccagaaaaagaattcactaaagacttgaagttaaacgaaaaatacacttttgataacttcgttcaaggtgagggaaacaagttggccgccggtgctgcacttgctgtagccgacagtcctggtagtttttacaatcctttatttatttttggtggcgttggtttaggtaaaacacacctgatgcaagctgttgggcatcaaatgctagcagagcgacctaacgcaaaagttgtctatatacagagtgaaacttttgttaatgacttcattaattccatcaaaaataaaacgcaggacaaattccgcgaaaaatacagaacttgtgacctgcttttagttgatgatattcaattttttgccaaaaaagaggggattcaagaggaattcttccatacttttgagacactttataacgatcaaaaacagatcgtaatgactagcgatcggttgcctacagaaatcccagatctatcagagcgtttagtttctcgatttacatggggcttgcaagtcgaaattacgcctcccgatttggaaaccagaatcgctattttgcgacgcaaagctgaaacagaaggtttgactatcgatgatggtacgcttaactatattgcatctcaagttgatactaacattagagaacttgaaggggctttagttaaagttcaagcttatgccacaattgaaaaagcagatattgacgttaaccttgcgcgtgaagcattagttgacctcaaattagttcaaaaaaatcgtggattacaaatctctaaaatacaggaggttgtcgcaaactatttccaaacttcaactgctgaattaaagggtaaaaagcgtgtacggcagattgtagttcctcggcaaatagcaatgtatctttctcgtgaattaacagatgccagtttgccaaaaattggtcaagaatttgggggaaaagatcataccactgtcatgcatgcttatgataaaatcgacaagcagatgaaacttgattctgatatcaaaactgctgtctttgacctaaagcaaattttggagcactaaaagttatccactgtggaaaaataaacaagttttacacaagtttttaaccgtaacaagtccgttattttaggcttcttatgagttttcaacagaactcacaggccctactactactaattaattatataattactaataaagagaaatcacacagctattcttgggaggaaaaacatgaagtttacaattaatcgcaatctgtttatcgaaaacctcaataatgtaatgcgggccatctcatcaagagctactattccaattcttagtggaattaagttagacttaacagaagataaacttacgttaacgggtagtgatacagatatttcaattgaaattcaaattccagtcaatgatgatttaaatgtggaatctacaggttctattgttttaccagctagattctttagtgaaatcgtaaaaaaattacctggtaaagacttctcatttgaagtaaaagaaagttttcaaactcagatcatatctgaaaatagtgaatttacaattaatggtttagatgctaataactatccacgtttaccagaaattccagatgctgcttcattcactatttctggtaaaactttccgtgaaatcattaatgaaacgcaatttgctacttccaatgatcaaacacgagcaattttaactggggtacgtttcttctttagtccagataaaattaaagctgtcgcaactgattcccaccgtttatctcaaagaacaattgctttagaaaacggacctcaagctgaaactgatttgattattcctggtaaaagtttgcaggaattagctagaatcattggtgaagctgatccagaagttaaagtttgcccaggtgataaccaagctttatttgtaattggcaacttgtccttctattcacgtcttttggacggaaattatccagacactgatcgcttgattccgactgaaaagaccactagtgttgaatttgacatttccgaattatctagtgcccttgaacgtgccagtttgttaactcatgctggccgtaacaacgtggttactttgactttggatatagaaaatcaatcagctaagttatcaggtaaatctgcggaaattggtaatgttgaagaagatgttagcttcagaaatcttgaaggaaacaatttagagatttccttcaaccctgactatatgcgtgatgcgttaagagcttcagtaacagattctgtaattatgagttttactaagccacttcgtccatttatcattaatccagataaagaagacattgaatttgtgcaattaattacgccagttagaacatattaatcaagtacacaatatttaggtcataaaaagtcgtcaaataaggcgactttttattttgctgtgtgtcgggcatggcatttgtctagtctagtgaaagtctagatcacgggtagttgtcgccaagtgtagcgaaccacaagccgttagcggtgacgctatgggtgaaggaagtggctagcgagttttccgagcctacgtacagaaacctggtcaggccaaatggtggatgagactgcagcacaagttaaagtccaaaggacaaccgtaaaaccaagacggtaaaccagggggcagtggaaaattaaagatgaatgtcttaccccgagagatctcgtggacaggtgaaaccgagtaagctttaatatcagcgatcgtaagcctggtcgaaaaaggttaatcgcgagaagtcagctgaggtcgtagtagtgctgaaggttttgtaatgaaactggagcgaagggcctaatgtttgtaagagcatatctcgctataagcaatgttcagacagtccggataagaggatagcctagcacaaagagaacgtaactctttgatggtgaaagcaattgggacaattctgaataaatttacaagtagaaatggagatatcacgagatggaactaattgaacagattttaagtcaaaataatctcaaggaagcaatcaggagagtcaaaatcaataagggagcgcctggtgtagacaggagaacagttgatgagcttgatagctattttaaaaagcatcaagtagaaataaaggacgccatcatgaagatgaagtatcgtccgcaagctgttcgcagagtctacattcctaaagctaatggtaagaaacgtcctttaggaatacccacggttgttgaccgagtaatccagcaggctattgcccaagtattaatgaagatctatgatcctcattttagtgagcatagctatggctttagacctggacgcagtgctcatgacgctattgaacaagtcttggaatatttaaacgaaggctatcaatgggttgttgacctggatattgagaaatactttgacacggtaaatcatgataaattaatttcaataattagagagcaagtaaatgacaaaaccaccctccatttaattcgagcctttcttaaagctggagtaatggaagatggttgggttaagcctaataaactaggtgtaccacaaggcggccctctttcaccaattctatccaatatctatttagataaaatggataaagaattggaacaaagaggcctgcgctttgtccgctatgccgatgactgcaatatctttgtcaaaagcggtaaatcagccaaacgtgtgatgaattcaatttcatcatggctagaaagaaagctattcctaaaggtcaacgcaaccaaaaccaaagttgtacgaccaaccaagagcaactttcttggctttaccttctggaaaagtggcgaatactggcaagcaaagccaggagatgaccgcaaaatcaagctttatgacaagatgagagaacttctctgtcgcagaaaagcagctgctcagcctctatcactagtctttactaagataaatcaagtagttagaggctgggtcaattactttagagttggcgacatgaaatattttctaattaagttcagtcaatggctgcgtcataaagtacgggtggtaatcattaaacaatggaaactaccaaaacgaatatacattaacttaatgcggattaacaaggcactaaagtgcaattttagtgatgaagatattcataaagtagctaatacgcgcttaggttggtataaaagaagtacgggttatgtcattaactttctgcttagcccaaaagtattgggcataagcaaagcggatcgcccaggcttggtcgatccgctagaatattatttatctcgtaaataatcacaaacgtagcgccggatacggaaccgtacgtccggtgcaatgagaggggcgagttataaaactccctctactctattttaaacgaaaacgcaaaatattggcgtatatttatttttttaccgtgctagtgtgattaggttattttgaaaaaaagctctgaaaaggcttataagagcgatttagtttgttatttgtgttgaaaactaatataattatataggtataaagcgtattgaaggtgagcattattaagtattttaaagttgacggcgatcatattactttggggcaatttctgaaggaagagagcattatttcatcaggtggacaagctaaatggtacttaaaagataatccagtaactttaaatggtgaacttgaagatcgaagaggcaaaaagatgcatgttggtgatcacgtagtggttaatggccaagaatatgagtttcggtagggaagtcaatgtatcttgatcattttactgtacagaattttcgtaatttaaaaaagcttgacgtaaattttgattcaaacgtcaatatttttattggcaaaaatgctcagggcaagaccaatttgctagaggcaatctattttttagcattaacacgttcacataggaccaataatgataaagatttaattggtttcggcggtgagtttaccaatttacttgggcatgtacataaaagccaagtggatcttgatttacgtgttttgatcacccaaaaaggtaaaaaagtatggattaatcgagttgagcaggcgaagttgtctaaatacgtaggtcagctgaatgcgattttattttcaccggaagacctcgagttgatcaagggtgcaccagcactgcggcggagatttatggatcaagaatttggtcaaataaatgcagagtatttatacttcgcaagtaagtatcggcaagttttaattcaaaagaataattatctgaagcagctagctaaaggtaaggcaaaggatcaggtctttttagatgtactttcagatcaactagctggtatcgccgctgaagttgtctttcgacgatttaaatttcttaagtatcttagtcactatgctagcgatgcttatgcacatattagtttgggcagtgagcagctttcaattgcttatcatccatcagtggctgacatccaagctgatgacagtacagaagaaatttatcaaaagattttagcaagttatgcacgaaataaggcaagtgaaattcgcaaggggacaactacttctgggccgcaccgtgatgatattgaatttaaacttgatggtcaaaatgcacatctttatgcttcgcaagggcagcagcgttcaattgcacttagcgtcaagctggcggaaattcaattggtgcatcaactaacagatgagtatcctttactcttgctggatgatgtaatgagcgagttagatcatggtcgacaaagtgcgctacttaattatattcatgggaaaacgcaaacctttattactacgactgacttagaggggatttcctgggaaataattaaaaagccgcgtgtgtatcacattcaatcaggcaaaattagtttggagaaggagaattaaatggctgataattcaaaagaaaatcttgaaaaggtcaaaaaatatgaaaaagaggctgacaagtataatgccagtcaaattcaggttcttggcggtctagaagctgtacgtaagcggccaggtatgtatatcggttcgactagttctcagggattgcaccacttagtgtgggaaattattgataacagtattgatgaacgacttgctggttttgcgaccaagattgaagttacgattaacgaagatggtagtgtcaccgttcaagatgatggacgtgggattcctgtagatattcaagaaaaaacaggtcgtcctgcattagagactgtatttactgtacttcacgccggtggtaaattcggcggtggtggatataaggtttctggtggtttgcacggagttggggcttcagtagttaacgctctgtccactaaacttgatgttaccgtaatgcgtgatagcaaaaagtactttatcgatttcgatcatggccgtgttaaggatgagatgaaacaaattggcacggttccacttgatgaacatgggacgattgttcacttctatccagatccagatattttcacagaaactattgtttttgatgacaagatcttgaagaacagaatccgtgaattggcctttttgaacaagggattaactttaacctttactgacaagcgtaaagacactgccgaaacagatgtgtataagtttgaaggtgggattaaggaatacgttgcctttttgaacaagggacaagaagtattatttgatgatccaatttatgttgaaagcacctataatggcattgatgttgaagtggctttgcaatatacaaatggctataagactactttgatgacttttgccaataatattcacacctatgaaggtgggatgcacgaggccggttttaagactgcgttaacacgtgtggttaatgactatgcacataagtctaagatcttgaaagataaggacgataatctttccggtgaagacattcgtgaaggaatgacagctattgtctcagttaagcaccctagtccgcaatttgaaggtcagactaagaccaagttaggtaattcggatgctagaactgctgtagataaggctttttcagaaacctttagtcgtttcttgatggaaaatccttcagttgggcgcaagattgtagaaaagggtcaattagccgaacgagctagaactgctgccaagcgtgcacgtgaagtaacaagaaagaaatctggtctggaaattgctaatttaccaggtaagttagccgacaatacaagtaacgatccaagtatttcagaactgtttatcgtcgagggtaactcagccggcggttctgctaagcaaggtagatcacgtttaacacaggctattttgccaatcagaggtaagattttaaatgttgaaaaagcttcgatggatcgaatcttggctaaccaagaaattagatctttattcacagctttaggaacaggctttggtgctgactttgacgtttcaaaagcacgttatcacaaattgattatcatgactgatgccgatgtcgatggtgcccacattagaaccctgctgttgaccttgttctataactatatgcgcccaatgatcgacaagggctatgtttatatcgccaagccacctctataccaagttcgtcaggggaaagtggtcagatatcttgatactgacgaagaattgcatgattacttaggtagcttgcaaccaagtcccaagcctactgtgcaacgttacaaggggttaggtgaaatggacccagagcagttgtgggaaactactatgaatccagaaaatagaagactggatcgggtaagtcctgagtatgctaaagatgctgacgcagtctttgagctcttaatgggaaatgaagtttcaccaagacgtgactttattcaaaagaatgctaaatatgttgaaaacttggatgcataggaggattagatggacgagaatcaaactcaagatcatagaattaaaaacgtcgatctaactagcatgatgcgtagttcatttttggattacgcaatgtcagttattgttgcacgtgctttacctgatgttcgtgatggcttaaagcccgtacaacgtcgtattctttacggtatgagcgagttgggtgtaacgcctgataaaccatacaagaagagtgccagaattgttggggaagttatgggtaagtttcacccccatggtgattcctcaatctatcttgctatggcacacatggcacaagatttctcataccgttacatgttagtcgatggtcacggtaacttcggttctgtcgatggtgatgagccagccgcaatgcgttataccgaagcaagaatgagtaaaattgctgtggaaatgttgcgcgatatcaacaaaaacaccattgattggcaaagaaactatgatgataccgaaaatgaaccggttgtcttacctgctagaattcctaacttgcttgttaacggtgctaacgggattgccgttgggatgacaacaaatatcccgccacataacttgactgaagttattagtggtttgcacatgttaatgaaaaatcctgatgctacaaccaaggacttgatgaaagttatcccaggtcccgattttccaactggcggaattattatgggacgtggtggtatctaccgtgcttatgagagtggtaagggtaacattgttgttcgcgccaaaaccaatattgagactgaaaagagcggccgcgagcgcataattgtgagcgaaattccatttatggtaaacaaggctgaattggtgaagaaaattgctgatttggctcgagaaaagactatcgatggaattactggtgtgcgtgatgaatcagaccagacagggatgcggattaccattgatattcgccgtgatgctagtgctagcgttgttttgaataatttattcaagcaaactcaaatgcaggctaactttggtatgaatatggtggctattgttgatggtgcgccacactttttaaccttgaagcaaatgctgcaatattacttggatcaccaagaagatgttgtaactcgcagaacaagattcgagttagctaaggcagaggcaagagcccacatccttgaagggttaagaatcgctctggacaatattgatgaaattgtccacattatccgcaatagtcaatcaagtgacattgctaaagcaactttgattagccgctttggccttgatgataagcaatctcaggctatcttagacatgcgtttggttcgcttgactggcttggagcgcgataaggtagaagctgaatacaaggaattacaagctaaaattgctgactacaaagatattttgtctaagcctgagagaattgaccaaattatctatgacgaattgcttgatattcaaaaacgattcggtgataagcgaagaaccgaaattggtgctagcgaagtcgtttcaattgaagatgaagatttgattgaaaagcaaaatattctgttgacggttacccataacggctatattaagagaatgccaattcaggaatttaagactcaaaaccgtggtggtaaaggtatcaagggaatgggtgtacaagatggcgactttattgagcatttgatttactcaagtacgcacgatctgctcttgttctttactaatgctggtaaggtttactccaagaaagcctatgagattcctgaatacggccgcgcagctaaaggattgccagtagtcaacttattgcaattggaaaagggcgaaaaggtccaaactgtaattaatattccggaaggtgctgacgataattacttattctttgttactaagatgggaactgtaaagcgtacacacgttagcgaattttctaatattagaaacagtggtttaattgccttaactttgaaagatggcgatgaattaagcaatgttttgactactgatggtaagcaaaacatcttaatcgggactcacttgggctacgctgttaccttcaatgaaggcgatgttcgggcaatgggtcgaactgctgctggtgttcgcggaattaacttgcgtgagcatgactatgttgttggttcaggtattttaggtgctgatgaccaagtcttggtaatttctgaaaagggttatggtaaacggactccagcttcagaatatccagttaaaggccgtggcggtaaaggtattaagactgccaatattactgagaagaatggtccattagctggtgtaacaatcattaactcaaataatgatgtgatggtaattactactgacggaattatgattcggtttagaattgatgatgtttcgcaaactggccgtagcaccatgggtgttcgcttgattaaagttagcgatgatagtcaggttgcaagtttaaccgttgttccaactgaggaagaacaagatcaaactggtgacgatgacgactcaaaaaatggataattaattaaaaaaacaaaaaatttgaacttttaaaaaaattatcaaacttttttgcgtaataaataatgagcagtaaaaaatctgctaggatcacgtgaaaacagtttggtaattttttatttatatgctaaaattagaaattgcgagtaatattccattactccttgttcttgattttagcaagaaccatatagtccagaaggaggtgcaatagtcatggcaactacaaagtacgaagtaacttacatcatcaagccagatgttgacgaagacaacaagaaggctcttgtagaaaactacgataaggttatcgctgataacggtggtactatggtagaatccaaagactggggccagcgtcgtttcgcatatgaaattgataagtatcgtgaaggtacttaccacattatgactttcactgctgacaacgctgacgcagttaacgaatttagccgtttgtcaaagattgacaacgctatcttacgttcaatgaccgttaagttagataagtaattttaatttattatccgttatgtgatttaggaaaggaaggtacatgagtatgattaatagagttgtacttgttggccgtttaacacgtgatcctgaattacgtactactgggagtggaatctcggttgctacgtttactcttgctgttgaccgtcaatttacaaatagccaaggtgagagaggcgcagatttcgtcagctgtgtaatttggagaaagtcagcagaaaacttctgcaactttacttcaaagggttcattagttggaattgatggccgaattcaaaccagaagttatgataataaagatgggcaaagggtatatgtaaccgaagttgttgttgataacttcgcattgctcgaatcacgcaaggatcgtgaagcccgcggtcaaaatggtggttatacaccaaatagtggaaatgctagcagtcaacctgctaacaatttcccaaataatggcggatcacaaggtaattcacagactaataacaatcaaaataattcacaagatccatttagtggctcaggtgatacgattgatatttctgatgacgatctaccattttaaactaaattaaagaaaggattctagaacatggctcaacaaagaagaggcggccgtcgtcgtcgtaaggttgactacatcgcagctaaccacatcgactacgttgactacaaagatgtcgatctgttgaaacgttttatctcagaaagaggtaagattttaccacgtcgtgttactggcactagtgctaagaaccaacgtaaagtagctaatgcaattaagagagctcgtatcatgggcttgttaccattcgttgctgaagactaatttagatcgaaataaaccaaaaggacaggacacaaggttctgtccttttttcgtataataattaaaaaaattctctcttcgtattgtacctactgttttcaatcatgagccggaataaggtataattaacactgatatactatatctattaggaaggatcttcatgaaggattttttacgtaagctagaattgcctgaatttattaaggattcacggctgacagcttctataatcattgcactttctctttcattattgggaagcattattgcgatgattatgaatccattgtttggtttggcaatgcttttagtctttattttgaccgttgcctttgccatctatgggacctatattttagcgggtaatgcgaatagctttgcggttaatttgtcttaccggataaagcgtagtgaacaagaagcaatgattaagatgccgttgggaattttgctttatgattcggatcaccaaattcagtgggttaatccatatctgcaattatatttaaagagtacagatttagtggggcacacaattgaatcagttgaccctgatctgaataagctacttaatgaagcaattgaggcaaaaacagcagaaaatcatctggttgattgggatggtcaccgatttgaaatggtggtccaaaataatttaggcgtaatatatttattggatattacgcgctatgccaaaattgaagataaatataaagctgaacgattggcgattggtcaaattttcatcgataattatgatgagctaagtgaagcaatgcatgatcaagaattgaccagcatgagttcatatgtgcaaaatacattgagtgattatgcgaaaaagtttaacgcatatttaaaacggattgatgaagaccatttcttgatcttgatccatatgcaagaattagctgagatggagaaggacaaattctctgttttagataaggtgcgtcaagaaacgagtagaaacaatacgccacttactttatctatgggaattgcttttgggagtgattctttgtctgaaattgccaaccaggctcaatctaacttggatttggccctaggtcgaggtggagaccaggttgtcttacgtcaacccggtaaagacgcccgcttttatggcggtaagtctaatccgatggaaaagcggactagagttagagcaagaatggtttcacaagcaattagtgaactatttaaagatgccgatcaagtttttgttgttggtcatcagcgtcctgacatggactcagtcggtagtgggattggcgtagtaaaattagctcgtcttcacggagttaaagctaattttgttttagatactaataagacaaactatgatgttggtcgcttggtcaccttaatgcaacagaaaaatcaggataaggatatttttattaaccctgatgtagctttagctcaagttactgacaagtcaatgttggtaatggttgatcattcgaagtattcaattacttactcacggtcactttatgatcgtttgaagaatcgaatcatcgttattgatcaccatagacgaggcgaggaattccctgaaaatccaatgttaacctatgttgaaccatatgcttcttcggcttgtgaattggtcactgaaatgattgaatatcagcagccagctaacggtaagcgagttttgaccgatattgaagctacagcaatgttagccgggattgtggtcgactccaaggaattctcgttgagaacaggaactagaaccttcgatgcggctagttacttacgttcaatcggtgctgactcagcagttgtaagcatgctcttgaaagaggacattgatagtttcctcgaacggacgcatttagtagccactttgaagatggtgaagccacatatggccgtattatgtggacctgatgataagattatagatccgatcattacagcgcaggcggctgatactgcacttgatttggaaaatgtgggtgctagtttcgcaattacgcggcgcagtgataatacgattggtatttcagctagatcaatgggtaagatcaacgttcaaattattatggaaaaattgggcggtggtggacatctttctaatgcggcaacacagattaaagatgttactattgaagaagcaaaacaaaaattgcttgatgcaattgatgaatatgaaaaagaaaatgattaggaaggacaaatatgaaagttatttttactcaagatgttagaggtcgaggtaagcgtggacaagttaaggacgtacctgatggatacgcacaaaattacttgattaagcgaggcttggctaaagaagctactaaaggtaacatgaataccttgaagcgtgtagaagctaatgaaaaggctgcttatgaagcagaaaaggccgaagcagaaaagatcaaggcagaacttgaaaaagacgataccgttgttaacttcaaatctaaggctggtactgactcacgtttgtttggttcaatctcaagtaagaagattgtggaaggccttgaaaagcaatacggtatcaaggttgataaacgcaagcttaacttgccagaaccaattaagactttgggctatactaatgttcatgccaaattatttaagggtgtagaagctactattcgcgttcacgttactgaacaagactaataaaaagtggttgtgattgatggataatatcgtttctcaacaaattccgcatgatcgcgatgccgaaagggcagttctgggtgcgatttttatcgatcctgaagcaattgcggatgctagtgcggtagttcagcctgaagatttctatgagcgggctaatcaaattgtctttcaagcgatgttggacttgtctgatcgcggggatgcaattgatacgctgaccttgcaggatgaattaaacaaaagaaatcagttagaagatattggtggtatcggttatgtttctgaattagcgatggccacaccgacagcagcgcatgttacctattatgccaaaattgtgcataggaaggcgctgcttcgtcgtttaatctctgctagtcagaagattatctctaatgcaatcgatggctctgacgatgtaacagacattctagatgacgctgaaagtgaaatcatgaatgtctcgtcagagaatagcacaggcggctttaggaccattaaagagatcgttaattcagcgattaatgatattaataatattccggatgacggaaatatggttactggcttgccgactggttttgcggaattagataagatgacaactggttttcacgatgatgaattgatcattgtagctgctcgtcctggtgtgggtaagacttcatttgccttaaatattgcgcaaaatgtagggctacacactgaaaaaagtgtagctatgttctcactagaaatgagtggagagcaactggttcagaggatgttagcttctgaaggactgattaattcacagcacttgagaactggccagcttgatgaagaagaatggcgtaaattggtagtggcttctgggtcactagcaggtgcgcaaatctttatcgatgatacgcccggaatcaagatgagtgaaattcgtgctaaatcacggcgattagctaaggaaaagggcaatcttggtcttattgtaattgactacttgcagctgattgaagggccacgcagtgaatcacggcaacaagaagtttctgctatttcaagacagttaaaaaagctagctaaagagttgcacgtgcctgttattgccctttcgcagttatcacggtcagttgaacaaagacaagataaacggcctgtattatctgatattcgtgaatctgggtcaattgaacaggatgccgatattgtttctttcttgtatcgtgacgattattatcgtgatgaaccagatgatggtgaaagtagcggtagtcaagatgaagttggcgcagaagacgataatggtgaagtagaagtcatcattgaaaagaaccgttccggtagccgggggacggttaagctaatgttttcaaagccattcaaccgtttttcaaatttggattatgcgcatgatcctaatggtaattagaaaaagcactcgatgagtgctttttctatgtttgaatataatacgaataatatttacatttataatggaaattgtttatatttggtgttgaaatgataccataagtttgctataactattactgaaaagagtaataacgaatatactcatggaggaatagcaaatttatgaaatttaagaagattttggttggtgcttgcgccgtcttggcagctgtctcattagctgcttgctcaaatggtaagaagagttcatcttcatccagtgaacctaaggaattaaacgttgagtttgtgccaagtactcaagccaacaagatggaggctaaggctaagcctttaggtacgcttttacaaaagcaattgcatatcccagttcatgtgaccgtttctaccgactatagcggtctagttgaagcaatgtcatctaagaaagtagacgtcggcttcatgccaccatattcttacatattagctcataaaaagggaattgctgatgttttattgcaagccgaacgttacggctatgatgaaccatccggtaagatgaatcataccttaatgcataagtatcgtggtatgatcgtggttaagaagggctcaaagatcaaatcttggaaagacttaaagggtaaaaagattgcgattggcgatcctagttcttcatcgggctatgtttatccagttgcggaactttacaaaaagggtttgaatgtaaccaaggactgcaaattagttaatgttaagggtgacgatcaagaagtgttatccgttttgaatggggatgttgatgccgcattcgtcttctcagatgcacgtaatattgccgctaaggatgacaagaaagcaatgaccgatgttgtgccaatctactttaccaagtggattccaaacgatactattgcggttagaaaagatatgcctaaaaaattcagagttaagttagctaaggctttcaagaatattgctaagtctaagaagggtaagcaaattatcgaaagcatttataaccattatggttatgttgaagctaaggattccgactttgatggcttacgtcaataccaaaagatcgttaacaaagctactggtggcagtaactaaaatagaataatttaattgaaagggctcaccattacgggtgagttctttttgttgtgtgtcgggcatggcatttgtctagtctagtgaaagtctagatcacgggtagttgtcgccaagtgtagcgaaccacaagccgttagcggtgacgctatgggtgaaggaagtggctagcgagttttccgagcctacgtacagaaacctggtcaggccaaatggtggatgagactgcagcacaagttaaagtccaaaggacaaccgtaaaaccaagacggtaaaccagggggcagtggaaaattaaagatgaatgtcttaccccgagagatctcgtggacaggtgaaaccgagtaagctttaatatcagcgatcgtaagcctggtcgaaaaaggttaatcgcgagaagtcagctgaggtcgtagtagtgctgaaggttttgtaatgaaactggagcgaagggcctaatgtttgtaagagcatatctcgctataagcaatgttcagacagtccggataagaggatagcctagcacaaagagaacgtaactctttgatggtgaaagcaattgggacaattctgaataaatttacaagtagaaatggagatatcacgagatggaactaattgaacagattttaagtcaaaataatctcaaggaagcaatcaggagagtcaaaatcaataagggagcgcctggtgtagacaggagaacagttgatgagcttgatagctattttaaaaagcatcaagtagaaataaaggacgccatcatgaagatgaagtatcgtccgcaagctgttcgcagagtctacattcctaaagctaatggtaagaaacgtcctttaggaatacccacggttgttgaccgagtaatccagcaggctattgcccaagtattaatgaagatctatgatcctcattttagtgagcatagctatggctttagacctggacgcagtgctcatgacgctattgaacaagtcttggaatatttaaacgaaggctatcaatgggttgttgacctggatattgagaaatactttgacacggtaaatcatgataaattaatttcaataattagagagcaagtaaatgacaaaaccaccctccatttaattcgagcctttcttaaagctggagtaatggaagatggttgggttaagcctaataaactaggtgtaccacaaggcggccctctttcaccaattctatccaatatctatttagataaaatggataaagaattggaacaaagaggcctgcgctttgtccgctatgccgatgactgcaatatctttgtcaaaagcggtaaatcagccaaacgtgtgatgaattcaatttcatcatggctagaaagaaagctattcctaaaggtcaacgcaaccaaaaccaaagttgtacgaccaaccaagagcaactttcttggctttaccttctggaaaagtggcgaatactggcaagcaaagccaggagatgaccgcaaaatcaagctttatgacaagatgagagaacttctctgtcgcagaaaagcagctgctcagcctctatcactagtctttactaagataaatcaagtagttagaggctgggtcaattactttagagttggcgacatgaaatattttctaattaagttcagtcaatggctgcgtcataaagtacgggtggtaatcattaaacaatggaaactaccaaaacgaatatacattaacttaatgcggattaacaaggcactaaagtgcaattttagtgatgaagatattcataaagtagctaatacgcgcttaggttggtataaaagaagtacgggttatgtcattaactttctgcttagcccaaaagtattgggcataagcaaagcggatcgcccaggcttggtcgatccgctagaatattatttatctcgtaaataatcacaaacgtagcgccggatacggaaccgtacgtccggtgcaatgagaggggcgagttataaaactccctctactctattctatataatatatcagttaaaatagacataaaagaaatgaagaaagaagaaaaatatgaaaattgcggttttaactgatagctcagcttatttaactaaagaacaacaagaaaaatatcaaatcgatgttttgccaattccaattatttggggcaaaaaagtatatcatgacttagtcgatattggttatgaagaattttatcaaaaactaaatacagcaaaagagctgccaactacttcgcagccttcaatcggtgatcttaagcagaagattgatgaatacgtggcagcaggctacacggatgttattgtaattactctttcaagtgggatttctagctatttctcaaccgttcagagtgttgcggcagaagaagaccgaatcaaggttcatccattcgatagtaaaattacctgtgctggtgaggcggattatgctatgttggcaggccgtttaatcgaggctggagcggatattgatttgatcatgcatgatcttaaggacctgcaaaaaacgatggatgtgcgctttatggtggacgatttgagccatttaaagcgtacaggtcgtttgtctaatgcggcaagttttgttgggacgctgtttaagattaagccgattttatcgatggatgtgcaaaatgaaggccatatttcagcgattgcgaaagagcgtcaatataaacgtgcatacaagcatgtgcaaaatgattttgataatttgactaaaaatatgccgtataagattcaggacacaatttttgattcacttgatcctgagaaaaaacaggcctggcttgatgattaccgagctaagttccctaagtataagtttgatactagtattatcggccctgttgttggggttcatgtaggtcaaggtacaatgtcgatgatctggtgccgtgatttggatacttattttgatgaaaatggtcagccaatcaagggaattgagtcacaagcagtagtggatccagagtaagcataataccgatatggcaaaaaaatgagaggcactattgattttttaatatcattgctatattattattaataatttaatatggcgatgaatagggatgatcagagtgtcaatcagttctttttttaaaaagttaatagccaaaaataaactcttgtttttagctatggtgattactagtgcttttgcttctttagatggcgtcatttctccttatgttattgggaaaattactaatacactttctcagaaacattttagtgagataccgaaaatcttgttactgtatctgttgatgatgctttttctgaatgttagcttttatctatggcaattttgttggggaaaaattaccaaatcaagtaatgaattattgagatctacagcttttaataattttattgcttcccctagtgaaaagaaaatcactaataccctgaattttatcaatgttaatgttaaacaaattgaaaatcaatgtattgattcaacaattatgcttgtttactgcgttgagcaagccatcgtttcattagtttatattttaagtattaatggcattgcagcaatggttttcttagtttgtgggttaattccatcagttattccacgtttaactcgtaattgggttcagacaggaactaaaaagtggaatagcagttatgaaaactataatcaaaaaacaagtgatgctgtgcatggtttcgatactatcagacatgcaaatggtgataatagattcaaaatatttgtccaaaaagcattaatgggagaagaaaagaagtattttttgatgaattttcggcgtaatacttctaattttttagcccaggtctcttattcattatcaatggttatttctttggctgttggtacattctttgtaattaatggtcaaattctagtaggtggtttgatttctctatttttagcatcagatcgtttaactagtccaattatttcgattgttaatattgcaaatcaattgacctctgttagtcctctgctaaaaaataaagctttacaaaaatctaaaaagcaagaatttaataatttagacttcaccaaattaccaaaccaagagaaaataatttttgatcactgcaatttagggtattctaataaagctattttgaagaatattaatttgacagtttctaaaggcaataaagtattgatcatcggtcgttctggtattggtaaatccactctgttcaagacattgcttaatgaaattccattgctaaagggcaaaatactggtggatgatagtcttaaccaagctaatttctataccaattttggtattgttagtcaggatacttatatattcgctgaatctttgcgctttaatttaacgcttggaaaagattttcctactcagcaagtaataaatgttttgaaaactgttaaattaagttatttagctaatgaaaaaagcttagacatgcagatcggggagaagggattatcactttcgggtggagaaaaacgaaaactggaaattgcacgagctttattgaatcaaaaatcgattttacttgttgacgaaggactatctggacttgatgaagaaagcaataaacaaatttttgcacttcttcaaagtcttccgcagacagtaattgaaattgaacatgctgttagtccagaagagaaaaatcaatttaatcaaattattgatctaggagctcagtattgatttttttataaataaacaaaaacaattacatacgtatgaaagcctttacacataaagacttttttatttataatattagcagcacgaaaactttttggagaaaaacttacatacagaaaaggatgagaatatggcagaaaagaaatatgtcggcagtatcgaagcaggcggtactaaatttatcgtagctgtgcaagatgttgaaacaggtaaggaagtagcgcgtgatcgtattcctaccactactaacaaggagactttacaaaagactgctgagtttttcaaaaagcaccccgttgatgcattaggaattggtacttttggtccaattgatatcaatcctaactctcggacttatggttacattttggacacgcctaagccaggttggtcaggtacggacgtaaagggcttttttgaaaaggaattaggtattccggttgccatgacaactgatgttaatgcatcatgttatggtgaatatgttgctcgcggccgcaatgattctaagagttacttctacgcaacggttggtactggcgttggcgctggaattgtacaagcaggtaagttgctcggccttaataatcacccagaaatgggccacatgttggttcgtcgttatcctggtgatgattatgagggtcactgtccattccataatgatgcttgtgtcgaaggcatgtctgctggtccaagtcttgagggcagaactggtatccctggtgaaaaattgtctcgcgataacaaggtcttcacttattctgcgtattacattgctcaaatgctcttcaatgtttacatggctgctcgtccagatgtaatgattgttggcggttcagttttaaatgaagatgatttggttaaggtaagaaagttctttgatgaatttaacaacaattacgttgccacacccgatttgaatgaattaattgtgcgtcctgctgtggctcacaacgggtctgcaactcttggcgattttgaattagctaagaatttgctcaaataaaaaagcatagataaattgaataagcaataaaaaggctcaactcgttaagaaagacgtaaggcgagccttttttgacgtaatttgacctaaatgcgcgtaatattaattctagaaacgtaaccggtttattaagaaaggagcccaactatgaacaaatcagatagtggcttaaaagacaaagttatcagtaaagtgaaagaagtcgaaggtaaaattaccggcgataaatcacgcgaagtccaaggaaaagctcaacaagccaagggcaaagttaaggacaaagccaaaaaattaaaagatgatctggaaaaagaccatcaaatagatgaagattgttaaagactcaggtcgactagcaatagctaaacagaaagcaaataggtgatcctatgttatcatggatctgggttttaatcgttggcgctataataggtctaatagctggtttcataaccggcaagggtggatcaatgggatttctagctaatttaatagcagggctggttggttcaaccttaggccaagcaatctttggttcgtgggggccgcaaatggctgggatggcaatcgtaccatcaatattgggagccgtcatcttggtactagtggtttcctttgtactagggatgcttagaaaaactgaataaaaatagaataagagaaaaaagacatgctgcaatgtcattaagttaagacattgacaaattatcgacttggacttttaagatcattcatttgtgatttatcgcatttgaatgatcttttttcatgccaaataaacccaaattttgtttagaaattaggctacacgatataaataatatacagctgatttgggtttgagatttcttttgtcttttcgtcctggtctgatcggaattgtgtaatgactaatttgaataagaatctttttaaagatttcagttgaagaagaaattatatacatagcctggatgacaaaacatgactgtttgaaattgatcgcatattgatacttgcagtttttttgtggtacatatgcttgagcatcaatttgactgactgcgttaaacataatcatgtgggcatagatctccatttcaataaatctatcctgcttggaatgaaactgtacgctacctaaagcatatttcaactttttgaatgaagtttcaatgccccagcgcaaatggtagatctctttgatcctttttaagggataatcggctctatttagattagttagaacaacttcccattcttctttgcctgatttaggatcattaattctaaatttacaggcacgaaattttattgtacataactctccaaagtcccagctgccatctttggtatttttagaccgatattttatatattgacggtaatgatggttaaccaaatgaacgttttctgtagccttatgggtttcataataataattagaggtagtcacccagcaagctatatccttatcacactcttgattaggcaactcagctacttccttaaatgcgccatatcccgttttagtacgtatgacataataacagttaggcaggcgattacaattttcaatcatgttaaagccggtataacctcgatccatagtaactatatatggtccgcaatttagctttttaagcatttgaatggcggctttacgttcatccatctttgacttaggctgaaagatgcagtcttgataagtattatttaacaggtcatagagtgcattaacatgaatttggcaatatggctttcctttatgattgagatttccaacgatattctctgatttaggattccagatttgattaaaatcagacccatcaatggcaaatatacgatatttatgatcaaataactggatattaaataaattctgattaaatacagttagaatatgcttaaaacatgcgggtgaaagctgacctttgcgttggacataagcggaagtactgactactttatcgttatttttaatagctttttggccaaaagctctaaacaactcactggtcaaatcttttccttgcatattaatagtagttttaatgactgtagctgcatctaaaaaccgcttcctagtgaaggcatgaggatcatcgataaaatcatgaatatgctttccagtatcattgataatttgatcaagacgatctaaaatatttctgtgaagggctttcataattaacaccagctttctggcaataattttgaaggtttaataatttaatcagagggcgaaaaggtaggttcttttcgcctttattttatgcaaaaaaagaaccaaatcataatgattcggttctacagagattagattcaatttgtcaatgtcttaacttaatgacattgagacatgctgggcatgtctttttttgtgtttcatgtgaaactattttagcttttttcgttcattttctttctcagctaaaaaacgttgcttaatttcttcaggcaaaagactagggaccgtcttgtcataaaattcaaagaatatgggtgccttgttagagtcattgctcttgggatataaggcaaagtcactttcgctaaacggtaagctgatattaccacgtaaagcattgataatctcaccgaacatatgcaaaacataacggcgcgtctcaggctctaatgacatgattacgcgactgaaacggacagtgcctaataatttatgggcagtaatttgaaaaatatcggtaatatttaattcatcaaatgcttggaaaagagcatcccataatgcaccacgttgcttttcagggatgctgtggttaaagtcgatgaagaaatgccgcaaagaacgtgcacctgaagtaagtccttctgctagaacaaaactatcacggccaacagaccaacggcgtggatcatgttgctggaccatcggtgcagtgcttttgacgattaaaacgtgttcaggatgatcaagcatggtgccaatgattgaagcttctgggaggtaggtcttcatcttgggtaatgcacgtacaaagccaggtgctttccagacttggtggaaaaagccggggccgtcaaagctaaaggccttgataatgcggtcttgcaattttggctcggctacgcttaaagcatattcagcgtaattgccgcccttagaatgccctgctaaataaattttgtcatggggaaaggcggcagccatttctttgagataattggcagcaacatcttgaccataaactttgggcatgtagttcatattcatgtcttcgttccagccgatgattgagttgtcggttccgcggtaaacgatgataattgtattatcgtttaggcgaaaagtagccgcggtaaattgaagtggataaggatccttttccagccgattagtccaattaaggattttgatgtcgcctagacgaggtgatttaggtaaaagaagaatttgatcgccagctaaatctttcatttgaacttgaaatgaaggaaggacgtgtaatttttctgcgacttcacttaaggtatgttccttagcagatttgtcgacgggtaagtagatgattgaggcgaagagggatgcgtccacgctattaaaaggccgttctttaaaagaaagatctccccgccaacgtaaataatcaagtgttccagccataatctcatcctttcattaattaggcaatattactattttactaaattgtcgcgccaaaataaaaatctcaagctaatgcttgagatttaaaatgattttacataccaccacgggtatagctaatgcgagtaatatcaggatatttacgtagattcatgacaatagagttctcatcaatcttattattaatgattccgtcaacgtataaaacaatacggttatcactcacgtcgagaattttaacagtaacattttcgacgtgattatctgctagttcttgcctgattttagacaaaatgtggtgctggttaatagccacaatttgaatgttaaaacgaacatgtggcgttattttgttgataatgacatcatcgtgaaagatcatttgaatgataaacaatagggcggttgataggataccgatgaaatacatgccagcaccaacagccatcccgatggcggcagttgcccaaactccagcggcagtagttaagcctgagacctgttcttttctaactaggattgtacccgcaccaatgaaggaaattcctgtaacgatctgagccgcaattcttgatggatctagtgcaatgtcatgcatgcttaatagatcggtaaatccatatttagatacgatcatgaataaagcagaagcaatcgcaactacgatatgagttctcacacccgcgctttttctctgaatcgcccgctcatagccgattaatgcgccacaaaaagctgcgacaacaattctaagtagccaatctaattcggttgtaattggagctaaagtttgcattatttagtcctcatcctttgtataatcaacaattattatcatttctattttaacgtaaatgcagaaaaattatagtctggggaatttttttgaacttttttcaaaaaaagacttgcacagtttccatctatatggtttaataaatactgttgtcgggtaagccaacgaagagttgctgacttagctcagttggcagagcacctcactagtaatgaggaggtcggaggttcgaaccctctagtcagcattagttaaacaacttacaagtttttaagtctatcatttaagttcgaaagagcttgatatgatagacttttttgttacttataattatttgtgtagatttaaaaatagatatgaatacttagtttcaccacaaaaaatgccacacagtttttctagtgtggcatttgtgtggcaaaggtactataaatactgtaatgacaggctttattgtttgtcattttttgatttatctgaattatcagatgaaaagaaattttctttagcaaattgtagactctgtataccttgatcaatagctgataaaagttcttttttagtagcttgagtattgattacttttgaagcagttagttcaatgttatgagccatattatcaacttcatcaattaatatattaaagtttctattatctacatctttagaatattgatcttttaatttattaagaactaaattttcaaattctttatttgttgttccaactagggaattgataaagttaagatctttaaatagaaaggagaaatcttttttccaaaattcattgatttcatcaaattgaggaaaatgtgttttttctgctgtcttatcaatatcgccgtctttattacgataaaaattcagaggagtattatagtcacccaaaaatagtaggtagttttttaagtattgatgaaattcatcagtaaagtcagaaacgttaaagtatttattatgtaaaagagatactaatttatgatcaacgtctgatctttgggtgccttttcctgataaatagtattcagaaacattaagcgcatgtgcaagtttactcattgtttggggagatggatagttaacaccactttcatattttgcaattgtgcctctggagatgtttaatcctttttcatttgatagataatcggagagttgggcttgagttttatccattttttctctgatttctttaattctaggtaataccataaaaatcctcccttaaatattcttcataattataacatgctctataaactaaggagctaaaaatatttatttagctattgaaaaggagcaaacaaaatgatataactatttatgtagaaaggagcataaatataaatagttcatcgttataaggagcaaataatgtatatgctctaaagtgtagaacataaggaggttccacatggcacaagataatacaacaaaacaaggtgaattgctttccacctttaatgagagcaacagtaagagaactccgattcaatcggctttaactcgaccattagaggaagctatcggtaaatgcttcttgttactaagcggaacaacagaagaagtccaagattctaatgatgaaagtaaaactattccgcgtgcagtatataaagtacgagttgtaagttctaatacaagactagcaattggtactgtgttaaccgtgaaagttaagggaagcaaaagtgtaattactgatgatgaaaataaaaaatttttgtttggtttagagaaaaataaggtagttgcctttgatgatcttagtcattggaattttaacggaaatgaggggctatctgcgtcaaatattagaattttggaagtcagtcctcaagaagctatgaacttataagggctaggaagtgattttgtgaaaactaagagactagtattagatacaaaaaagccgctaggtaatcctagcgggctaaaaatggcagaaggagtaaccttattgttatcaattgcagttgagtataaggttgcgcctaacttgttaagcacgggcaattacacagctcttgcttatccatttttagtaaatattatacccttagggtatccatgttggaagtggattaatcttcatattattaactataaaatctataagcgattaatgagcatcattcattctgaacaacttatagattatgcagataaaaaagaaacaacaacttttaatgaacgaaaagttgaatatggcgtcaagattatctatgaagaaacatcagaaggtatatacattactgtatatcctaatggcataaagcatagtgatgctacacaaacgctaaatagcaggctagaggagaccttcaacatgaatgtcttatcagtagatcaccaattatcttatacaagatacttgttaagagatattgataagcaacaaatgaaggttatggatgatgtgttttagttttaatattcaactagataaaaatactagttttagtcttaagggctcaggaggtcttctgatagtcggtcgtagtgggtcaggcaaaactaacactacgacttatattatgcttaaggctgtctctcaatgtgattgcggattatacattattgatgctaaaagagctgatatgtatggacttcatcaatttttaaaagatggcaagaaagtagtagcaagtacaacaaatcaaatagcacggctattgcgtgtcattaacgagaatatgagtgcaagatatgagcacttcaaaaatggaaaatggggacaagatttctcagaatatgggtatcgaccttatctattagtcattgatgaagtatcagctatgcttgctgaagctggtaagaataaaaaagagataatgggtgaattacgtcagattattctgcgaggtcgacaggctggaatctttacacttatctctggtcaaagaattgatgcaaccattttagatcgtgatattacattgcaattaggcacacgaatcgttatgggacaagcagactcggaaacttatcgtatggcttatccaatggtgaatgatattaaagcattaccattagttccaaataaaccgggttatggtcttatctattctgatggacaaaagattagcaatcctactccgtttgtgtcacctgatatgtctaatattgatgtacctaaggtaattacccgactggaaaataattatgactcgtctaagtataatgatgagtctgattattggcaattatagttattttagttgccagctgacgggggacggagtcacccgaatggaatgttcaagcgtgagcgggctggcaacacccacttaataatatgggtgtaacggaaagattattaatcatggaaacgatgaataatattaaaattgatcaacttcgtctaaatattccatatgatgaaatctatcaagtagaaaatagtcaaagtttacccaaagaagttatagtagctgataatctgctgcatctggcatggttgtttaagtctaatacagtgagtcatggacataatggctatacttcttcatataatttcggttcaggagaacaaggcggaaatatttccgtaatgtggaacgagtcaagaaaagatatgggaatactagtcgactttactgcgacaggcaaagcgctatatgaaagccttgctgaattacatggaattcctgttaattggaagaaaataattgaagaattatatgaaaaaatggggcatatatcgaggctagatatagctactgaccttattaattatggtttttcagttaacgaaattattcaaaggttaaagaatgaagaatcatttttcttgaatactcaaggaaataaaatcaatgctaatcgatttaagataattggaagctatagtgaagctcagactctatatatcggtagtagaaaaagtgatgcttttctgagaatttatgataaaaaagttgaacaggatcgagccgatggactctatagaaacttggctagaaactgtaacgattggataagagtagaagcagaatttaaacaccgtttagctaaagaactaggaaaatatattacaacattaactgcagataatatttatccttatttacttggctgtgtactagaacgttggtcattagttgatagggaagaataatgacatatgaaaaattccaatattctaaagaatggaagattttaaaagagttatcgaaaggacaaggacttcaagaactaaaacaagctcaagttgacgcttccctgaatagaaaaattaattggttcttgtatggtggtgccagtggagttattacgttgattaaagaaatttatggtgatgaagcactaaaaaagttttatcaatttttagattattttatttctaatcctgatacgttaggacattactaccactcggacaagataaaggcggatactaaaactattgcagattctacgcaaggcttgaactttggagaatatttagaagacttaaagagagaattagttgagggagataaacagaaaggcaggggctaatatgtttggcacagagttactcaacgctagacaaatagcagaagaattaggtattagctatacttacttttttaaattaattaaaaatgggtgtccttatcatcaacttggagaccaaggacgtaaatattacgttttaaaggaagtacaagagtggctattagtaagtagccaacattaattagaagacgtagcaacttgctacgcttttttaggagaaagctatgtcaattacacaaattaaaacggggaaaaataaaggaaaataccgtgttagaattcaacctactgataatgaaacaggtaaaactattccgattcctagtaaagtaacaaaaactagcagtaagcgtgaagcaaaacaattagaagaacaaatgtgggtgcaatatcgcgcgcataaagaaatgaatttaaatgtattagatcaaccacttgcaaaagctttagatcactatgtagaagaagaaagaagttcggggcgttggtcatcgattactacgtatgataattggaaatatacggttaagcttgtttctcaatatttcggaaagaaaaaagttaaagatatcaaagaaaaagatatgcgtagttttgctagaaattacataagtacacataaagcaactgtggcacctcattcaacgctagatagacagttacaaaatttaaggagttattttgctactttgaaggaatatggtgtcttaaagaatcctattcctatgaagccattaactaagttttttagacgtgatgaaatgaatgcccctgttaagaaatatgttttcactaataatgaaattaatgttcttaaagatagaatttatagagagcttggagtaacaagaataagttattggacaactagaattgctatcttgatagctctagatactggaatgagacctcaagaaattcaggctttaaagtggagtcaaattactaatgatggaagttttaaagtttttagaataaatgactcatggaatgaaaaagagaagcatcttaacggacatttgaaaagtcgaccgcatggagaatctagactaacccttcccctttctgaaccacttttgcagttattgaataagtttcgtcattgtcagttagaacttttaaaggagaatggtttaactaattttaatgatcgaattttattgaacatcacagattatcacttgtgcgcattagggtatccaataactcaaaaaagtatgaatgatatgttgaaacagttgagtaagaaagtaggggttaataatcaaaatttaaatataagtatgtatacttgtcgtcatactgtagcaacaaaattagggaatacaccaggcatgtcttacccttgggcggcaagcagattagggcattctttaaagatgtttatgcggacatatgtacatgttgatgaagatcgaaatgaagaaatgcttagattgatagctaaaagataaaagaaaaatgcaaaaataacttatatttgataaaaaaatgaattaatgtagcaatagcaagaatttgaaaataataaataacaaataatttttaacattttatagattttgaaaaaaaaagagcgtatactcagggcatcataaagagatgtgaaggagaaatcaaaatggttattgtagaacaaaagtttaataaatataatcatacaagcaacatggatgctatggagtacgctgcaggatgttgcacatgtacaacaacaagttgtacaacttcatgtgccgctgtagctgaaagttaatggatagttggcgctgtaaattatattacagtgctttttttaggagtataaatactgttatgtgtctattaagaataaaagacttaaaagttaattttaaggatcaaacagtactggattttagaggtcatgatatagagataaagtcaggagacaaagtagctctaattggaaaaaatggggcaggaaaaagtacactattaaattgtcttttacatgaagtaaaatacactggctgtataaaggagaagtatcatcagtcggatataggagtagtttttcaagaaaatgtatattttaaattcttgaaagtttatgaaatctttgaattagtgtggaataaacctaaaaagttaattttaaaatctaaatttattaagaattttaatttagcaagcattatgaataaatacatttctgacttatctggtggtgaaaaacagagattaacaatagctttggttttttctcaaaataaaaagatttacttactagatgaaataaattccggcttagattatgataacaggcatgaattaagtaaaatcataaataatattactgaagaaaaaacagtaatacaaataagtcattattttgaagaagttgaaaattgggctaataaattgataatccttgatagaggcaagatgatatattttggaagcttatctaagttttattctataaataagcatgattcattaattattataaatgataaaaaaagcctatctagactgacccagaagcctttaaatctttatagtaataaatatattgtatctagtagtattgatgagagacatgatataacaaatttattagagcaacaaaagatagattataaagtggtgccacaaaatttatacacaacttataaattagcattagtaaaacatgaggataggtaaaataatggctagagaaattttattaagtttaaaagcacaacttagagttccaattgctgtatttttttctattttttttccaattattatgatgattatgatgatgacatcttacggtaatttttcattaagaaatggatatcactttatagataagtatttttttattagtactactataggtattctacctctaaccttaattagttttcctattgatataaataatttgcttgaaactaagcattacttgcgtttgaaatacttaaatgttgatttaaaaaaattatttttatcaaatattatttcttatttgataattgtatttatttcagttggaataaatttaatagtaggaaaaagtatatataatttaagattacctagtatagagtatttatgttatttttttattcaattattctattgtgcgatagttctacttatatttggcttactgttaagtttaatagtatcagatatcaaagctttaatgcctgtaggaatgactataatgtttatattatttatggttataggtgtttttgtacagtatagctccttaccgaaaattatacgtactatttctagctacataccagtaaaatatttggcaaatgatttctattatatctggattggtcaggctaaatggaatatgccattttttaaatgtaatacgatctggcttatttttctgtgtttgatttgttacataatttatagaaggaagaataatgttacgaagattttcaactagtaaggatttaagaattgggatagagataatagttggaatcactttatcatttatcattaattttataatgatttcaattgggtatgccattacaaatagtgaaaaattaaaagaatattcggtcaattattttggattagtcatatataaaataaagaattatggaaataaaggtataccagtttccaataatatgatgtttatcggaatagttttaacaataatatttgtttttattgtagagtgggttgtatataagagggataagaatggtagagtatgagcttaaaggattatttaatcaaaatacgctttcaacatcagatattagtaataataataattacaataatcaacaattatttgatcatattataagaggaaatgctaattctgagatgctgacatacttacttaatatgaaccatcagcgattgaatgattttaagagtatgcatcaatataattatggaaattttgcatccttaatgaacagtgtagaacagtataacgaaatagaaaatgatgaaactattttgctacctaagccattgagaataaaaaataagttacagcaggttctaaagaaaagaaaaagtgttagaaattatataggcttatcatgtgatttacgagaattgtccacaatattgatgtattcatttggaatctcgggaagaaaagagaattttggtggaatagtcgcaagtatgcgatattacgcttctggaggtgctctatatccaatttcagtgattatatatataaataaggtggatggattgaaaaaggggctgtatttatatcagccaatgtatcattccttattaccactaaatattaaaactcaaatcgatattaataaattatttgtaggaagtaacattgatgttaaaaatagtagcttttttgtattttataaatatgcgattagttctacatatttaaaatatggtgagctatctttagctaatattttgattgaagcgggaatgatggcgcaaaatttttccttagtaactacagcatgtggttttgggtcatgtccaattgcaggatataacaaaagatttattgaagatatttgtaatttagatcatgttaatgagcatataatttttactgaaagttgtgggagaaatgaatagcgatacgattttttttgtaaaaaaagatacacatatacgcgtggtgctagttaaatcgttttagttaataaaaaagtccaatcttgttagactcgacttgtaaatagtaataatagaaaagagtctgatctgattgaactgtcttaagcttaagcgttttagccaccatttacaagttagttttaaagatttagtgataatttgtcggcactggtatcgtttgtatgcaccggctgagtttactcatcggcgaaatattgatcaaattaaaactacggacagtctgattttggctttacttatctggcaagctaagacaggaattgaatcacaaagaagattctgtgaatgtttcaattgtttatcacactcacgttttaatcgacgttcacgtcagctattgcaattgatttatcagatacggcaagaaatgaataaaaaggttgacctgaatggacatttcttgatcattgacagctttccggtacctgtttgccaaccaattcgcaactatcgtgctaaaatttttcgcggttatgccaacattggttataaggccaccaagaaaatttacttctatggtttcaaagttcatgtcattgttagcgatgacggttacattcttgattatgtcgtaacaaaagcatcagttcatgatgccaaggagacagttgaactgatggaaaatgcacatccatctaattactatcttcttggcgacgaaggctatttaggcaaagaactgcatcaacagctaaaacaaatgggttatgaactttggacaccatatcgtaaaaatatgacaggagctaaaaagcacaatgatcatcaattgatggctattcgcagaacaattgaaagcgacttttcgcttctgacctattacaatgccgagaacaatcgagcacgtagtctgataggctttcaaagccggttggaaattgcaattttagcttataatttggcttattgtctagaaagatttaactagcaccacgcgtacacatattaattctaatataaacgaatggatattaagtaagggaataattcataaaagcactttaacaataagtaaaaatgaaagtagtactttgtttgtaagtttattcaagcaattaatacaaaatcaggaaattaaagttagtgaagatgatgaagagtattcagacttaaaaaaacttgttcagcttggatttttaggaataagaaataaaaataaaaaagtagcacttattgtggaagaaagtgcaaaaaacttctttgaaaactatttaaaagatgaaaatatatgtgttagctcattagatgagtttataactcaagatacattaaatattttaattgaagaaaaaaataatactaaattaaataaaatagttcaaaactataaaaataaatacaaagatgtagatttgatttttgtttgttctttgtattatgaaaattatttaaaaggaatcaacaagctaactaaattaattagtatcccatataatataggattttatgataataataatatatttgctactagaataatacatggagagactggctgctatcaatgtcttgaaaatcaaatactacaaaaatttgatggatatatcgaagattatgtatcagaaatggattctgaaaaacaagtatttgatataaaaaattatggagtattaatatctataattaagtcagagatagaagaactaaatttatactctgatacagagctacgaggaaatgttcttcatttttatttacctacttatgaatacaattttgataagaatagaattcaaagtgattgctcagtttgttctactataaataatattttatttaaagaacaaaatatgaaagcgtgcaatattttagccgaggttttaggtaatgataaatatcaagaataatttagaatataatttattgcgtcaacggatcttgggtggcgctataactggaatctggaaaaaggatactttctttattggcgaaagttcgtatccggtaatgaattataattatattactgcaaactttactaattttgaaaaattcgcttttcctggctatgttcccccgattaattatcatcttagtggctacggcttatcttataataaagctttatcggcttttctaggtgaaagtacagaaagatattctttttcagtcttatatcaaaacattaagcataatatcatttattctgattatcaaaatcttcagaaaaagtattctaattgttatatagtacctttaaattatattaatatttatttttcaaaagaagataaagaaaattatataactaaaaaagatccaataagatggatagcattaaattcactatttgatattaataaaaaggtactagttccgcttcagttttatattatgtataccaacagtatatttaaaaatgaaaaaagaattgtaaatagtgctacatcaacaggaactgcttcgcaagaaagctttgataaaagtctggaaaatgccatagttgagttcttacaaatagattcttttaatctttggtggtatggaggtctaagaggtaaaaatttaaatattgatacagaaggcttattaaaggaattgttcccaaacaataatagactttggatgtttttaaaaaaatttacggttaattttatagatattagttttgacaaagcaattaatgtagttgtttgcgaaattaccagtaatagtgatagtaaactacctaaatatgtagtaggagttcaaggaggattttgtttaaataagtgtattgaacgatccttttttgaatgtgtaactgttttagaatattgttttactcaaagttgggttgaaggttctaaatttaaaaagatttctacaaatatagatgatttaaatgtaaataatttagacgataatgtattgttttatgctaaaaatggaaagcctaaattaatcaaaaaagagaatattttaagagtgtccaaaaaggttactaatttaaaagatttgcttttgaatttaaagagcatctctaagtatgcaggatatttaaatattacgcctccagaatttagaaatcaaaactttgaaatatgtagagtatttataccagagcttttaccaatttctttaccgtcttatccgccttattatcatccaagatacagtaaaataggaggtattattaataatgtcccccatcctttggcttaaaatagcttttttcatcactttgtttccaggcggaatatatttgataataagaagaatattgtccagccatagaaaaagcatgacagtatatttaataaccttggtaattgtagctattgtaaataccattattttaaagatcaattttaataggtatattgaaatcatcttaatattgattattccttttacgtattatttttttgagtatgttataaggtataaaagattcaatatcttaagttttaaggctaataaaacaattatttatgttttagttttttttcctatatttgaagaagttgtttaccgtttctttatatttaaatattgttcggttttaggcttttctggaatacaggctatgatatttgcaacgttatgctttgaattttcgcacatatattatttaggctttaaagctattaataaattatttttttcctttattcaaagtatgttgtttttggtttttcaaagtttattgttaataatatgtttacacataatttttaatttatatgtgtatttacacaaaaaagatatgtataaagttattttttgatattgacttgtattacgtatataacaatatgtgccacacggtttctagaaaaatcctaaagagtgctaattttaaaagcaaaaattgttaagccttttacgcttctagtcagcattagaaatacgtttaagtctttcaaataagttcaatgaagcttgatttgaaaggcttttttgctactttgaactagaatgaaattctttgaaataataaggatttatttgaaattaacacaattcaaacacacagatacgattcatgtgttaagaatgtgcttgaaggaaaattaagagtactaaatatagtgatttaacaggcgttggagcctgttttttttgtgtttggttagggcattttgtttaaattaaattcagtggatttttgtgcaaaaaaatagccatattgtagggttatacatattgactattttctattattaaaattatttcaattcagccacaaacctaattccttgataagaaggaaacttgtaattatcccatgaaaaataagtgtctggaaattagttctttctatttaatctcaatgctatttcaagttagctattaatctgtatcctaagaatccattgctagattttggattccaagcaatacctacaccaatttttgtatattgaccagataaaagaatgtctctatgtccccaattagatcctgcatcatgataaatgaaattatttaagcaaatttttgcttgtgtagatggggtatcagtattatcaactgcacctccagcaagcacttctgcgtattgagtgcggcttccgtctggccttgtatggctaaaacttgtatttgcttcggtagctctagtccttgcatattcttgcagagaagtatcaagtgttaaagaatttagtccctttgattgacgtaattgatttaattgcgcaataaattcttgttctaatttggtagcaaaatcagaatccttaatgtttgtatattcattattgggttttgtatttgtggtttcattatgcttaataaaattgcttgaattagcactttgagtatttgtttcatcggatgtacttttagtaatagcagatgttttagaagtgtcaggttctgaaactttgtgagttaattctgaactaatccatttgttagttccaactttgtaccatgttttaccacggctatccttcttttctgcataaacatataagtattttttaccatgaattattttagtgcggtaagcttttacacttctgcctttcttgagtgttcttgctcctttaatacgcttgcctttatagttgtaaacataagcattgtgagtaagtcttacgctgttagtgcttgcttctactacattggcttgttcgttgccagcaacaactgtagctgaaagcaatagagctgatgaaagcgtaatggttgatagtaatttagtaacgtttttcttttgtaacatggtagttacctcctatattccttatttcagattagcaataagactgtaccctaaaaatccgttacttaatacgggatcgaaagcaaatccaactccaatttttgtatattgactagataaaagaatgtctctatgtccccaattagagcctgcatcatgatagatgaagcttctcaattgttggctggcttcttgctctggtgtacttgtgtcgttaactgttcctcctgcaagtacttctgcatattgagttctacttccatcgggtctaatatggtcaaatttagtattggcttcattagctctggttactgcataagattgaagtgtattatctatgcttaatggcgctaacccattggatctacgtaattcatttaattgagttacaaaagattgttcagtttcatttgcaaagtttgagtttatgatatttgaatacgtctgttcatttgaagccgaattattatcttgttgagtaatactttgtgaatctgctttttgacagtttttggaactatttctttttgtataaaatttatcagtgtcagtagcaagtatccatttgttatcaccaattttataccaaattttatcgttaactttttcttgagcataaacttttacagattgtccgactccaatgtattcgccagtaggtgattgattgggagctttatatgtttcacccaatccattatctgtaatttttgcagtgaacaaataatttgattttgtgttttgcacatttgcgagcctgatatagtgatgactaccaatgtataaatattttgtgccacgtattttcttagtgcgataggcttttacatatttgccttttttgagtaatttaacacctctaatacggttgcctttgtagttatagacataagcattatgcgtaagtcttacatttttagtgcttgcttccactacattagcttgttcgttacttgtaacaactgtagctgaaagcaatagagtggatgaaagtgtaatggtcgatagtaatttaacaacttttttcttttgtaacatattagttacctcctacggatattcattatttcaatttctaaattaatgatacatgatgtgaaaatgcatttcactgctgtttttctttgctggaattatatttatctctcgtaaatttataaaaaagtaaaagattgaaaagttaggtgcatcatttaatacaaaatataaactgaaatagattctcgttgaatttggagactgtaaaatagtttgtgtaaggatgaatgattccttaaatttatttctttaaacattagaaaaaggagttcctttctcgtatgattggtttgaacacaaaaacacatacagaaagaagaactccttcatgaatgattttaccaaagattttgctcaagctctattcaatccagacaaaataaatgatttattgcgcaaagagctacaacaggctgttaataacttgttagaagctgaattgactgcctttctgggctatgatccctatgccagaaatggctggaatactggcaactctagaaatggtgcttatttccgcaaagttgatacgcaatttggcccaattgaagtgcaagtgccccgggatcgcaacggtcaatttcatcagcacacgctgcctgactacaagcagcactcggatatcttggaaagcatgattatcaagctttactccaagggcgtgaccaccagggaaatagccgatctaattgaaaagatgtatggcagccattacagtccagctcaggtatcaaatatttccaagcagatgattccaaaggttgaggcttaccacaaacgcaagctaagcgacaagtttttctgcgtctatttggatgcgacataccttcctttgcgccgagaaacatttgagcgtgaagcagtctatattgccattggcatcaagcctaatgggcacaaggaggtcattgactactgcattgcacctagcgagaacattgaagtctggacagatatgcttcaaaacatgaaatcccgaggcttaaagcaagttgagctttttctttctgatggtgttgttggcatgaaaacagccttggccaggacttatcctaaagctcattttcaacgctgtttggttcatgtcatgcgcaatatctgcgctaaagtacgcgtcgacgatcgtgaaaagatcatgaacgaattcaaacaggtgcatcaacagacaaacaaagaagaagccacagctgtcctgcatgacttctataccaaatggggcaaggtttacagccatgttatcagaagcttgaaagacatagaaccagatctgctggtcttttataactatcccaagcagatcagagcttcaatttattcgactaacatgattgaatcatttaacaatgtgatcaagcgcaaagctaagcctaaggcagagtttccaactgaacagtcgcttgatgcttttattggcattcaggcaatgagctacaatgaccgttatttcaatcgaattcataaaggctttggtcaggttcaggacaccttagaatcctactttgattaaataaataattacttaaacttcccacatcaaataagctggcaattctttgatattgcttagctttgggcttctatactatttttgctagttttctttaacaatttttgcatgtatttgggtaaacgattgataaagtcagccgtgaattctgctatttgtgcttcactggcatgaaagactttttcaacgctagccaccattgcttttgtgattagctgaagtgaatgactgaatgtaatatccgccagctcatcaatcatgcaatagaaaagctcacctaaggttcgctcatcttcgtcgtcccgcttggctactgacatgagcatatagcgggtaaagactatagccacatgagcagtcaaggcatcgtaggacagaccatgatattccgtgcttagttttaggtagcttttgcaggttttgaaaaaaacttcaatatcccagcgtttgccataattgcgaatgacttcatcttcgctaagcgacatgtcggtacaaataatagccagccactctttacgattggcacggtttctaacgcaaattatccgagcgtcaattttagcaccgtctttgtcttggcggccaaccttgactggaattgacaacagatagcgcgaacgcccgcgtcgctttttacagctacgataaatctgtttgatgtttttgcgttctccttcaaattcatatttgattttggagctaactttaaccatggcaattacatccagcttcctttgcttgagctggacgatttgatgtggatttgagaaccagctgtcaaacagcacgtacttggcttgatgacctgctttcatagcttggtcgattaaattaaccatcacgtctgtgcctttagtccgggcaagcatgcgtcttttgccagcaatggtgcgctgatcacagactttgttttcgccaatcatattctgtagcttgtgagaggacagcaacaccgaattgattggcatgaaagaagctccatcagtccagcccagggtcatcatgcgaaaacctttcttgtaagtcattgatacatggtcaaaaactttggcgactaattctgttttcttgaagccggtcctagagaagtaggaatcatcgacaacaaagcaatcagcccgtttttctgaagtcaaagatcgcaagtgattattaatgatttgcgcagaaagcagtgtggtgaagtggagccaattgacgtggacgttgcgcataaatcggtaataagaatttttagaaaagctttctttaaaatgatccgttttcagctgcatatataagctgcggtcacgaaagacattgcttaaaacgtaaagaaacaagctgaacaggctaatgcctttttccttgcggaagccacattttctcaacagcttgatcacctgaaacttcttgatgaagctgatgattgagtttgaaaatagttgttcatttttttggtcaggagatggtaaaatagacattggcacaagcctttcatgcatagaattatcgtttggtcactttaattatagcaatgaaaaggtcatgtgccttttatatttgttaaaaaacgcagaatcacaataaaaggagcgattctgcgtgtgggaagtttaagtaattaaaaaatcaatttacgagaaagaactatttacacaaaagatttgacagtttctgaatttgacaagcaatatacagaaattatcaataaaaagtacgttttgctataccttttcataaacctgactacaatgagagttgaagaaggcgtttttgtatgacaaaagaatatgaaaaagaagtcaaagaagcagaaagcgtattggaggaccaaaagttaactgatagtgagatttcacaagaattgatttccaaagataatccaactgaaaatgtaaaaccatctgagattgatttcttgcgtaaaaagccaaatttgacaacgcaaattgatttcactttgttagctgatcttgctgggttatccaaggaagctaaggcagaagcggctgtatagataaaaattttacgtagaaaaaagaccggtttgaaccgatctttatcttataaaaatttactttaggagcgtttgtgaaacttagctactccccaactgattagatagaaagtcgaaatcaaaatgaattgaatttttaattctaaaatgaatagtggaaagtaaaataaaacggaaaacaatagaataatagcgtaaattccttcgaatgttagaaataatctgtttctttttctatttttaagtgttgctagtatcattttttcattcacaaagatccctcctaaaaattatgaaattaagaccaacttaaataaggaatagtccatcggataggaacacctaggagccaatgtccggagctgagaaaagtgttttttaacacaacggtagtaacaattgcaataactgcgagtactaccaataagattagtaatgtactttgtttaatttttgacatgattaatgcatcctcctaatattttttaaacttctattattttgctgggataatgaccggtaattgccaccacattactgtagcctcctcccttttttaatcatttagtcggtttggttaaatactactccttagtgactagaacagattaattttgtatcacatagtttacaaattatttgggccaagttttaattaaatcttgataaccatatttttgtacttcatttctaattttttgcgcttcctctttattgtttaaaaataaattctttaaatataaagcagcaatcttataaagcaaaaaatgtatggttggttttgattccatgatgtagtcaattatttttggaacatgcattaattgaagtgattttttagaaagttttctattatagcaaaccgctagataattctcgaagacacgcaagtatctttcttgttctaattcggagatatttttattgcttttcatctcgttaagtagtctattgataaaaaatgcaagggtatcttgttcccagagcggcattgtattagtaaaaagtcgcagtaattcaggattagtcatccagttttgtccttcgttaaattcaatgaatagatctttttttattttgggatcgatttgatttaatttattttttaaatatgctacagaaatcatagctcttaattttaaaatcttagagtgagattgtgacagaatttcttgatagcatgattcaatttcatcaatttttcctacattgaaggcttgttccattttattatttaaatctgattcaatctttttttgctttgaagtataggttgctcgcaataattggtaaaagtaagtaatatcaacatcatgttcaaaaagaatcgcggctaatttatctgcactaattctgctttttcccgcttctactttcgcataaaaaggccgagtaacaatgttagcagccatttctttttgagtgaggtctagattttgtctaatttttcgtagtgcttgtccaatagtcataaaaaatcctttactctaaaatattttcttctctacgatatatgattattataaatgatgaaaatataagcggataaattaaagagaactatggatatcggaacggcattaagacatttgagagatgatctaggtttgacacaaaagcaaatgattcaggggacgaaaataactgttagtcactattctaaattagagaagggacaaaacaggatatttatcgaaaacctagtcgagatattgaagcaacgaaatatttctttatcatattttgttgatcactatcttaatgatgaaaatagtgaaaaagaagtaaattattcagaaatattaaatattgctttttacgaaaaagataagatcgctgctgaagaaataaaacgacaaattttttcagataagagttctagcaatgaattgagagatagagcaacattaattgtggatatgatagacaaccagggacagagtaatgttgatgctcgaatcattaattctattttcaaacatgacaactggactcagtatgacgaggcaataatattattgggtaatattattagaactagtaatgtattaaatatgagtcctttggtattgactctaattagaaaatataaagatctagataaagaaaaaatcgaaaaacaaagaaggttagcaacggttggaattaattatttatttaattttcgaaagttaagtaaagagtttaataaaactgtgctaaaaattataagctggattaaaacaacatcgattgttcctgagttaggcattattcgagaattaaatgcatattttttagcagtttatgaaggaaacatttctgtctcaactaatatcaaaaatgtccttaaaatatcaggttatcaaaatcttgctaatgatttacctaattaatcccctgagaggggattgagttgctgtggaatgagaagtagataaaatcatagttaattaaatatgaaagagaggcatagtaatttgattattgttagttatccagttttacctgaataactctgagttcatacagtacgaggagatataaattatgaaaaaaagattttgttaagcctaagtttagtagtattaggaaatactttgttttttaattcgagtgtagcttctgcagcgactaataatagatattccgtaaataatacaattcgtcaggcacctaatactggcgatgttcctggtggatggggcattactcctggtcatacacattggggctaagtgatagaagcgatgaatgaattttcattgctctttttattttgggatgcgaattttatgaagaaaagtaaaatcatatttttaatagagcttgtattaaatattattgctgctgtttttctagtaataaataattcattcaaaaatttattagatgtaggcgttgtatttttactacttctattgcttatttggaattttttaagaagaaaaattgagattagtttaaaactatcatggctcaatcttatgatattaccagcaatttttacttattgcttaaatactgtagctaatgttttattggtaaaatatcctgttaaaagtgttttaatagctataatttatagtttgttattcttagtttatttgcttccggtagtaattactaatgtgggattggttaagaataagtatgctagagtttttattgcaatgtattatattgtgctattactttttagcgaaaacttacatatgaatgactacttatcatcctttgtaaattggtctcactctgaaattcttaatgggttagcgttaattccaatcatattttgcttatttaaaagttgggatattcgagcaaagcttaatcttaaatttaggcgatattcaaatatacagttaatagttttattagtagctgtattctttgctgcttggtattccttctttcatagctatgtttatattgcaccaactttttcgcaattattttggaattgggacttctcggaaattatcccaactgaacgagctgttttatggagtttaggagcgattttattcgaagaaggattccggtatctattaataattgtattgcttgaagtttttaaagtgcaaaggggtcaaattgactattttcttgagtgcgctattttttggattgatacattatgccggactacttgaccaaggcccaatatttataatttcaacgcaagcaatttttgcttttggttatggctgctttttggcgacactgtacttatattctggaaaattctggttagtattgctttcacatttttcattagatcttattgcattctcgctttctgcaggtggtggcggaatactatcatggtatggcaataatgatctcttgagtaatggtttgagcatggtttttgctttagttatgacattgattatgtttttaggtaaacaaaggaaaattatgcaagaaaatgctgctagattaattaatgcatgatgcatttaagatggtcgaaagatcatcttttttatgcaataaagtgtcatatataattgacacctactataaaagttgctattattttaaaaacgtcacatataaatgacatctaactagatgaataaagaagaattcaatgaatcgagtaagagaatatcgtaagcaaaagcaaatatcacaaatggagcttgctagacgaataggggtggcaaggcaaaccattaatttgattgagaatgataagtataatccatcgttagaattatgcctaaacttggcgcatgcattaggaacggatttgaatactttgttttgggatggggatgaagcaaaatgagacgagaaagtttatggcttaagtttgtcagatattggtatggcattgatagtaaattagacgagcggcaattagcagaggttgaacgaatcggtaataatgcctatgtaatctctggtatagtggaactgatcttactggttatcacgctaattatggcattgactattaaaagtgagctggctttgtggtttttacctttggcgattgcaattatgatgctgatgatgagtgcttatacttatttgacaatgcgaaaatttaaaatattctctgtcgaaattacagcagatgaacgccccaaagcaattcgtagaatatggataaaggctataatagcgggaataattggtgcagtttttggtacattaggtagcgcgctaggagcttcttctgtgcaaaataatctagtaaatgtgcttgatttttggccacaaggtttatggctaggcgtatgttgcggtgctggtagtgcgattggaagagtgcaacgattgaaagtaattaaagaagacgaataagcgaatcgaaagtagtcgatccgctttttttgctgaaaaactatataattaaagtaacaataaaatttacagcaaggcaaaaaggatgaaaaaacaaaataagactggctcaattggcgtagtgggtgccacggccatcggtgttggtggcatgatgggagcaggcctatatacattgctcggcttggccgccaactctgctggtgtttggctgccagtatcatttctaattggaggcattgtggccgcattttcagtttattcgtattcaaagttaggaatgaagtatccagatcgaggcggtgccgctaagtttttgctaaaagaattcggagatggcctgctagctggtgggatgaacgtcttccagtatatcggctggattatcgccatggcgttatatgcgaccggatttgcggaatatgcctgccaactattgggaaaatcaagctcaggctggctaggtaaggcaatcagtatcggaattgtcatcgtggttgtggcaattaatattatgggttcaaagcaagtggcacgtgcgcaaacggcaattattgcgtttgaattgttaatcttactgtcttttgtagcggtaggtttaactaagctgcatgtgccgacaattactagttcaaatagcggcaatattgtaggtatcctatctgctgcgggtttactttacgtaacttatgaaggttttggcgtagttactaacgctgcagggagtatggtaaatcctaaaaagcagttgccacaagcgctgttcttttcattagggatcgtcatggtgatttacattgtagctagtgtagtcgtggtgatgaccttaggcgttcaaggcgcagtagctaatcaaggccacgttttggcaacggctggtaagctagtattaggcaactggggtctgttcatcacttcactgattgtctgcatcttcgttgtgattttcccattatcagctgttggtgagatggccagcctagcctttttattggtgtatgccatggttaacttaggccacttgcgcattgcaggacaaactggggccaagcgctggattttgatttgctctgttgtattgaatctagctttgtttgctttgttgtttattcagacaattctcaaccacgaaactttaacttggatttcagtaattgctttgttaattattagttttttagttgaacttgcttggcgaaaaaagaataaacgcaacctgcattgattaggaaaaaaatagtaatttatgatacaaaaagtcgacttttgttccacttattgggtacaaaagtcggctttttgtttttttcgttgtcaaaacaatatctttaatattttaattcagatatactctctttgatcaagtttgaagtgagggaaaatgaatgaaaaagttattgatcggaagcgcagtcttagctgccttattaattaaagaaaatatcgcagtaaatgcggcaatagagcaaaacgaaacaacgcctaagattgcagttactgacaaaaaagagaagccaaaagaccagtctgataatagttttgcaggtcattatgaccaagagacaaattttattacctgggaaataaggctgaatcccaagaaagaaaaatatactggtgatttgaagttggaaaatttaattccagaaggcttagttctagatccagatacgattgaagtaattaagaatgataattttattcaaaattctagtttagttaaattgaagaaaaacaaattaacagctgaatttcctgctaagaagtattcagagagcacaattttgattaagtatcgaaccaaggtggaagcagagcctaatgagcctaattatcttcgggtgagtcagtcctttactttgggcgatgatcgagttcaagaatacgagcaagaaattaaatacgatcgaagtaataagaattttaacattgaagcgccacataaatctacgtttagagatgataatcaaatttcgttaattaaaaaatctaaaagtaatgaagaacgctctgaagattggcttaaacgtctagcagagctgattattaataaaaaagaaactacttcagataaaggaggtgaaaaagttcaaggacaggtcaaagatcaaaagcagcaagcttccccagaaaatacaaacctttcacgcactccaactgtcaaaggcttgactggttttgatactaaggctaacgaggtaaaatccacagctaaaatagattctgattcagtaaaaactactctagataaagacgagattaaggacaatgcaagtactatctcgcctaagtcgcaaaaacacgatactcatgtcacactccctaaaagtgacacatcagaaactaaggcaaaattacctaaagctggtgaaactgccggtgttatgctcagcgtattgggcataattttaataattgcagggtggacagttcgaacaaaattcttaaaataatctatatttgtactaaaatacggattttcaatagccaaaatagactctttcacgtattatttagatagataaacttgtatcatgaaagagaaacaaacatgccgtacactatttcagaaattattgttttattttttacttattcagttatcggctggctttgggaaaccttttattgttcgatcaaagaccaccattatgattatcggggatttctgtttggtccttactgccccgtatatgggttcgccgttactacaattttaatttgtaccaaagacgtgcgagataacctgctccttttatttatagtagggactatcgttgccactattttcgaatttgtggctagttggctattagagacaatctttcacatgaagctttggaattattcaaaattatggggtaacattcaaggtcgagtggccccaatgatttcattattttggggcgttggtgtagttttattagtaaaatttattcagccaatcattcagaagctcattaataatgaagaaaagataactcatggctggctagctgtgggtattaccattgttatgggtattgacttagtattaacagtaatcagtgtcgagagattccatactacaactaagatgtgggatgtgcatattaaccactttattgagcgagttagaactaaagtagaaagtcatatgcctgagaaaggaaaattgcgggttggtgattggcaccactcagtgatgcagcactatgatgaattacaaccgcaacgattaagctggaatcataagcgctacttgaagagctttccaaaattaaaagttactgatgctcctaagttcatggaaattaagaaagaagtcttgaagaaagaaagctaactaacataatcttattttgtgggattgaaaaaagtcggatgatcatattaggtcatccgactttttcttatccattaattctatttggttcacgttttttactttttatttcggtgtagttatctaaaacgttggcatagcgtccaagggtgaaaaggtaatcagataatcgattgaggtattttaatacgtcatctgataattcctgttcatttaaacttaatttgaccaatataatagcaacaccatcaactcctgaaactactgaagaagaacatctgacagtaaaagatcatgtgggttcatcaactttaagaagaggattaccacaaactggtgaaaagaaatctactttgaatgcaggctttgcccttgctggcataggcttggctttgcttgcagggatgttgtttgatcctaaaaagaagcactaatactgaataagaattaagttcgttaaagatcgaatcattttgggttcgatcttttttagtaacaaaatttaaaaaatcccaccttcgtgaataattgaatactttatatatttcaatcgtccactttagtgggattgtattaattcaggatgatctttttgaatttcctgtttttgaagggcagaccaagtccatggaagagttttttagtcgcctagaaactataggcaaggcttggcataaagcctatgataccattgattccgatacagatagagtcattaagagaactaaaatggatgctcgtactacgttagacctactagaacatctatcacctgtacagttctcttgaagagaaaaagaatatcagcacgtcaccagtatggttcttagactatgatcaaaaaatttattgtactgatgatgccatcattggtcagatgcttcaaaccattaatcatgacattacccgacgcagcagtcgtagcttattacactggaaaattcttaaacaaaattgttccagaaatttttatttttgatggatgttattttttgcttggttctaagcgattttatttatcaaagttaatagttctatgttatattataagtgttataataatgtaaaaattattaagcattgaaatatagtgcattatgatacgaggagaaagatcatgttagaaagagtcccaaaatatacactaagaaaactgtcagttggcttggcctcagtgatgattggatcaggaatactgatgaactctccaaaggtacttgctgatactattaacccaaatgaaggtactagtactgctgttcaaccttctagtcaagataaagataatagtgagccaagtactcaatctggtgctactcaagatgaaaacattgattctaacgcagctgttcaagagagaagcgacaactcagttactgaaccagcaaccacaactaatgctgaagaaaaagtagtggcaacaaatacccaagatactacgcaagataaagacaagcagacaaatgcgaatgaaactacgcaaaatactaccaatgtcgacaaaaaagatactgaagtaacgccgactaacgacgcaacaacagctacaccgaagacaaccgccaaggttaacgcaccggctgcaccaacagcaatgaaggcagcagctactgctgaaacaccagatccaacggttccagataactcagctaatactgctattatcaatgacaagaatagtttggaaaaaatttggcttgaaacatctactgcgcgggcccaggtctacactaccgttaagggaactgatcaaaaagtctatgtcagttcctatgcagaattcggtaagcgacttaattcattaatttttactaatcgctttgatccaaatagtctagaattacacattgaatatcaggtgttaaaggatagggttcaaaatttcattgtaaattggggagactggctccgactagataccagtagaattggtaaagatggtctaactttcactacagatacaggtgaaaaagtagcctatacgttaacaccaggatggggggaagtacaaaacctatgatgaatggcttagtgaaggccaagatatgagtaagataaatgctcttaaaattggcaacaatttaaaggccgggactaacttcgtattaaccgttcccctaaaatatattggtagaactgatggcacaaagcaatttaacaatgttcaagttgtagattacgggcagccaaatgctaatatggtgttcgattttattgaattacatccagagcaaatcgatactccagaagctccaactactgataaagagtcagttactaccggtatctataacaatccgttagctactgctacagactggtataaaacggagcatggtgaatatgttgcatactatacagctaaagggaaagatggtaagacctatgtaactggatatgtggctgccaatggtaagtctgagtcgattatcaatgttgatcagattgatctaaataccttggaataccatatgatttaccgtaatggtgacgaagaagtagcggccggtatttcagcaagctttgctgatggtaagactctattatagttgggaagattttcttaagaaccataacggatcggtagataacctcgttggcatcaatatgaatgcatccgctttcaagccgggcgatacaattgaagtagttgttcctgttaggtatattgggaaactttctgatcaagttcaatccttagaatttaaatctgaagctagaaaagatgtttcggttaaactctacttcacaactgtgcgcaaggacttaagccaggttaagcaggtagtcttgcttccgactgagttcatgggagaacaacctggtcaatcaaactggaagctggttaaggaaattgaaaaagatatgccaaatgggtgggaggccattaaaattagtaacttcccaacctataagggatcattcaatatggattcactaccaaaaggggacttaccatcggttgtttatggctctgcgcaatactttgttgacctccaagaaattcagaaaatttttgctaaccatggttacacggtcaagtatgctaacaacaacggtaaagctcaggaaatgccattctatggatacgttaccctgccactggcccttattgatggtggtggtaaacctgttgccccatctatctggacaatccaagttcaagctgtgcctgctattattttaaataaagatcaacactatgtggcagatccgaatgctaagccatgggacaccacttcaatgattgatgagatttatgctgctgatgacgcaggacagcggaagacgcgcgatcaactagaaaagttgccaaagacggacgtggatattagttatgaataccaagctccaggggctgctacagctgctccggttgataaggtcgacttgactaaggcgggggtatacactgtcacttacagtcatacttatgctgatgggcgagtagttaaggatagtcgcaaggtttatgttgatgatgttaagcaagaaaccaaggacattactcgaacaattattgtccacgagccaaacggaactgaccaaacagttatccaaaaagcaacattgacacggaaagtaattcttgatgcaactactggggaaatcaaatctgtgggtggatggtctactgctaagtgggaaagatactcagctccagaatttaaaggttacactccagccccggctcaaattgatgaaactgctgtgaacaaggacactcaggatacaactgttgagattagctatacagctaatgagatcacaaagccagaaaccaaggacattactcgaacaattattgtccacgagccaaacggaactgaccaaaaagttatccaaaaagcaacattgacacgggaagtgattctttatgcacctactgggaaaatcaaatctgtgggtgaatggtctactgctaagtgggaaagatactcagctccagaatttgaagattacactccagccccagctcaaattgatgaaactgctgtgaacaaggacactcaggatacaactgttgagattagctatacagctaatgagatcacaaagccagaaaccaaggacattactcgaacaattattgtccacacgccaagcggaactgaccaaaaagttatccaaaaagcaacattgacacgggaagtgattctttatgcacctactgggaaaatcaaatctgtgggtgaatggtctactgctaagtgggaaagatactcagctccagaatttaaaggttacactccagccccagctcaaattgatgaaactactgtgaacgagaacactcaggatacaactgttgagattagctatacagctaatgagaccccagagcaaccagataacagcaaggacaaaggtaataatgacaacaatggtggtaacaattcagatgcgattgtgccaataaatcctagtgacaataactcaaataattcaaataatgcaccaactgacaataagaagactgatgacaccaagaaagataatactggcaagaagattacaaaggagactcctaagaaggtaaagaataataagtctaacaagaccaaatcaacgactacttctaaatctaaccagtcttcaaaggctaagcgaaccactaaatctggtacgattagtcctaaggcagtcgctttagctaatactactgctggtctagctacttcagctaaggcaaatatggaaaacggtattgccaagaacaacagccaaaattctcaaactttgccacagactggtgaaaatgaaagtaaggtagcatttgccgttgccgggttgttagcagctgctttgggcatttttggtatagctattaatcataaaaaagaaaattaattagctaagttgaataaatcatacaaaaagacgcatagaatagcaatgtcattaagttaagacattgacgaaaatcagactttatgaaccgaattattttggctctttgtcaaacaccctaaagtataaaggtagatagaaacatgacgatgtttttatctaccttttttcttatacttagattgagcttgcggttgaacccttcaaggcagccgttagaataaggcagttttgctccattaagcacagcttttaggttatgtttaaaggtcaatagtgttttgtgcattaaagtcccaatttgatcttggcagttgattaataagttgagctcatgagtattgcccgtttcaacggcttgaataaagctttgcatcaggttatatgaattctctaaggtagtgctggtattgatgccttctgtaactacttgtgcttgagttaagcagtctttgtagtgccagttatagtgaggatgaactttttcaagttcatcaaacttcttcaagtataatttccaaggagacttaagcagctgatattgccgcgatcttttatcaaaggtcttcatgacttggaccctcagcgagttgaatgagcgcgtaagcatttgaatcatgtgaaaacgatcaatgacaatctgtgcattaggaaaacaagctctaacgatatcttgatagtaaaaattaagatccatcgtgaccgttttaacgttagctctagcttggagcgagaaacgaccaaaatacttaagcagcgtcttcttgtagcgagttctaagaatctgaacgacttgatgattatcaccatccaggcagataaagtgcagctggcggtaactcatcaaaagctaaatgagctggcaaatattcgtagctgtcaataaaccggtgtgaacagttgcccagtactctttgaacagtattaattgaaatattgttttctctggcaatgctggtcatagatcgatcttcagttaaagctgacaacactttaagcttagaggcattagaaatagaacagtatttaccaattcagactgagccatagatcagcgctcacaagtgcgacatttaactcgttgcttagctaatcttataatgaccggtaagcttgcattagctgtcggatagtgaatgttggtaatcaaatggccattatgtaagagatctagggagccgcagaaaggacaagcaggttgaagcaattcagcttcatagattttatgcttttgcagtttgatcgatttatagaaatcacctttatttataagaatttgtgtggaaacgatttttattgaagaggactatgtcctcttttttgcaataaaaaatcctgttaacagcttatcatatagataagtcatcaacaggaaaaattatagagccaatattttgagattaattgataggggttgaaaagtaaattttatttgttatagaaaatatagaaaaaggattgttcaagaaattattttacgaaacctgcagtgaaccaagtgttggcactaggcttaagtgaccagccagtgaccttcttgttaacagcagtgattgagtattggttggtagttggcacaacgtatgcttcatcatacatccacttttgccacttcttgaaggcattagcacggtaagtaggattgaaggccttctctgagtcgatatcagccaaaagcttagtttgcttaggtgaaacgaaacgagcaaagttgtatggtgcagcttcattgtaaaggtcgttaggggatggttcacttgaaagtgaccaaccaccttcgaagacgtcgattcttggatcgtcagattgaacagcttgtacccagttgttgcattccattggacggccgccgacaaatttaacatccaaaccaactttcttccattgttggatgtagtttctccaaacaggttcagcggtagttgagttgtttctaacagccaagttaattactaacttcttgccgttaggttgaactctgtattcacccttcttcttgtagccggctttatccaataattcgttagccttcttcaagttgtatgggtaacccttgattgacttgtcagtataatcaccaaattgttcagggatcaaagtgttaacgcggaaggccaagccgtggtagtaacgtttagcgactgcatcaacgttcattgcataagccattgccttacgcaatgatggattgtccatcttggagttcttgttttcaacgttcttgccagacttcttatcccatttacctaccttaaagcctaagtagttgtaggataggggaaccttaccaatgaagttggtatcagtagcgttcttaacatcatcccattgggtgttaactacgccagctatgtcgaacttgtgactcttgatggcttgagtaactgagttggtaccgatgactgtcatggataccttttccaagtttggtgtaccacgccagtaatgcgggttacgttcccaagtgacagattgaccacgaacaagcttgcttacgcggaatgggccgtagaagagtggttgttttctaaccttgtcactagacatcaacttggagaatggtacgtcctttaagtaatggtaaggttcagcgtattcctagaagtaaccgttacctgattgaagcataccaggcttcatttgtttaaagtgaattacgaccttgcggccatcttcgccatcaggcatctcaataccagaaatcttcttgctcttgccttcgtgatattctgctaaaccaacaatgtcggcaagagaatcggtataacgttgtgacttggagtctttattagcgataatttcataagcgtattccacgtctttagcattaacttgcttgccgtctgaccacttaacacccttcttaacctcgatagttacggtcttggctttacggtcaagcttaaaggtagcagcacctttattgttaatcttgtattgatcgttgactgagaataacccttcttgtcctggctctgcaacttcactgtcagtggcagtatcagataattctggcaagaaaataccagtgaagggactatcagattcgatagcataatttaaagtgccaccttttttaacacttttcacaggaacagtttgactgaatttgtgatgtgtttcatctgcattattattttttgaatttttattattaccacaggcaaccaaacttaaagctgccccagaaacaagtgctaatgcaccaaaatatcgttttgctttactcattcaaaaagcacctccaaataaattaaaaatatttgagttttattctatgatattaaaatgaaaaaaacaatagaaagatgaataaaaatgtgaaaaatattatttttaaattatttttgaagctaagattagttttctttcttggctaattaggcatagaataaggaaataacagctttttatgttggaggaaaatatggatacagcctggcaaaaatttaaaaataatattccattacgtcgatttgtggtactgctattaattattgcctgcctttatgaaatacgagcaatgatgaacacagtattattaacttttatttttacttatgtgatcgtgcatttaattcatctagtgcagcggtattttcctaaaataccaacaggcctaattgttgcggtaacatatctaattatcttggcgctactttatttcgtggttaccatttatttgcccatgttagttggccaaatatctaaaatggtaaagtcagtgatggcgttttatgaatcaaatgaatcatcgcgcttagccagccatgtaacgcgttatatcagtaaaggtgagattgttacgcaggcaaaacgagttgggacttttgctctgcatacggtgaccaattttggtagtttaacaattgctacctttatgtcattgattttgagtttcttctatacgattgaattagatagaatgattgaattttcaaagttatttgttaaaagtggttactttaaatggctttttgaggatattcgctattttggtaaaaagtttaccaatacttttggtgtcgttttagaggcgcaattctttattgccatttgtaatacggccttgacgatgattggtctggcatttatgcatatgccgcaaattattgccttaggcttaatggtctttattttaagtttagtgccagtagctggtgtgatcatttctttaattccattaagtattatcggctattctgttggtggcattcgttatgtgatttatatcttcattatgatcatgattattcatgcaattgaggcctatgtgttgaatcccaaatttatggctagcaagactgaattaccaattttctatacttttttagttttgttagtagctgaacacttctggggtacttggggcttgattgttggtgtaccgatcttcactttcttgcttgatgtcttagggattaaatcggcgaagaaaagtaaaaagaaagcgaataaataatgagagtacttttgacaggtgatagcattattgcacgccaggaaggaaaaaatgaaccgcatcttaattggaatttgcaccaattattgccagatattgaaatagaaaataccgctgtttcggggattaactccggggccttttttgccaaattaaatgaattagtactaagcgtaaagcagtgcgataatttggtgatcttgctgggaaccaatgatttggctatgcacaaacaagtgccagcaaggcaatttaagcaaaatatggaaattatttcctcggcaataatttgtcaatattacccaccacatgttctgcttgtttcgccgccagctgttgatgaagctaagcaacgtgtacggaataatacgttagtagcggaatatgctcagatcgtgaaagaagtagcacatgagtatcattttcgttatgcagatctggcacaagctatgcgggatactggcgatttaagcgagatttgtcaaggagtaaaaaacgatggacttcattttggtgatcgtggctatgagattttaggaaaactaattgctgaaaatttgaaacaaatgtaaaaaggaccgcaatttgcggtcctttatttttcgctattttaatgttgcccaaagcaagcttccagctagcgcaatggccaagaacggaatgagcaaataggcaaaaaagaaaaacataattcctacgactagtaaaaagccgataattttaatgaggccaattcctaatttaaagaatagccagagtaagagtaatgttaataataaagaaagcatattaatacctccataaatctatgagagtattttactaccaaattggacgaatagaatagtaggaagattaatgctttagaaaaatttagttaccggtaacaagataaattatattgaaagctctttctgtaaccgctatattttaactattgaaagcgatttaagaaacgagaggaaaaataaatggaggagaaaaaaactgggttacctacgctagctagtacgacaatttggatgattagtttggggtatttgggtgtgcaaatcgcctttactttggaaacatcacagatgagtcgaatcttccaaacattgggtgctgatccgacaaaattaggctggttctttattttaccgccgttagctggattggtagtgcaacctggaattggatcattatccgatcgaacttggattcctaagattggacggcgtttgccatatttattagtcggtatgatctttgccgtaattactatgattttgttaccaaatgttggtagttttggtctaggctatggttcaattgaggctctaatatttggtgctgttgcaatcgcgatattagacgtggcatcgaacatggcaatgcaaccatttaaaatgatgattggtgacatggtcaatgatgaacaaaagtcatatgcctatgggattcaaagcatgttgtccaactttggtgctgttattgccgcatttttcccgttcttattaactagtttgggtgttgctaatactgctaaaaagggtgtggtaccacaatcagtaattatttcattttatgttggtgctgccgttttagtcattacatcattgttcacgatattcagagtacatgaatatgatccagaaacctacgctcgttatcatggaattaaagaatctgataatcaagaaggcggtggttggattgaactgcttaagaaggcgccaaaagtcttctggcaagtgtcattagttcagttcttctgctggatttctttccaatatttatcaacttacgctactggtgctattgcacaaaatgtttggaatacgaccaatgcctcctctgcaggctaccagattgctggtaactggtttggtgttttaactgctgtacaatcaattgcggcagtagtttggtcatatgttttagcgaaggttccaaataatcaccacaagctaggttacggtatcagtttgctactaggtggagtaggatatacttcaatcttcttgattcattctcaggggtttttaattctatccttcattttaattggtatcagttgggctggtatgaatacttatccattgacgatggtatctaatgctttatcaggtaaacacatgggaacatacttaggattgttcaattgctcaatctgcttacctcaaattgtagcatcactgctcagcttcatgattttcccaatggtgggtaactccatgccagcaatgatgttgattactggtatttcaggcttcttaggcgctttatcagttttagcaattaaggaaacctacgtaaaatagcataatttttccgataaaaaaaacactgcgtgcattgtcaatgtcattaagttaagctattgacattggagaaaaaacaattaaagcatcatttggctttagatagccaatttgatgcttttttgtgtacgccaaataagcgtagtttgtatttcttttttattaggccacgcgatacatgtaatatactgcagacttggcttttaaatttcgtttgtcttttcgcctttatttttgcaaaaaaaagaatcgaatccaaatgattcaattcctaaaaagatcagttttcaaaagtcaatagcttaacttaatgacattgcattttgaataactgcggagatttttggtataagtcccttaacgatgacctcggctcttattataataagaaaatccgcaaattcacagtgttcatattatagctgtcgttcactcttaacttataatcctaaaataacgttctaatctgtgaagtattgcagaatatcctcctcagttaggcgttttttgtcgtcgcctttgacatcaaaaacgattctaccattgtttaaaatgatagtgcggtttccgtatttgattgcgtcttttaattggtgagtgatcatgacacaggttaaatgctcttcttgcacaactttatcagttagttcaagcaattcgcggctagtatttggatctaacgccgcagtatgctcatctagtaagagtaaatcagggcgcttaattgtcgccattaaaaaacttaatgtttgtcgctgaccaccagaaagattacccacaaaagtatttaagcgttcatttaacccattagggagttgggccgcctggcgtttaaattcttgcatatgtttatctaggcctcttaaacgcagaccgcggtgttcacctcgtttggttgcaagtaataggttttctgcaacagtcattcgcggagctgtacccattttaggatcttggaatacttgggcaatatatttagcgcgttttacttcagaaagattggttaaatcttggtctttgagcagaatttttccgctagtaggaaaaatagagccattgataatatttagtagcgttgatttaccagcaccgttggttcctaaaagagtaacaaaatctccatcttcaagttttaaattgatgtttttgaggatttgcttttcctcattggtaccagcattaacagtagtagtaatattttgtaaatcaagaatagtactcatggtttttcaacgcctttctttaataacttacgagtgcggaatttttgttcaaataatggaagcatcatgcaaatagcaagaataatagcggaaatcaatttaaagtcgttggtactaaagccaagttggaggactaggagtaagataaggcgataaataatactgccgataacaactgctaccaagcgggcggttaaacttaaattaccataaacgacttcaccaataatgatggcagctagtccgataaccatagtaccaatacccatattaacgtcagcgtaaccaccgttttgggctaataatccaccagctaagccgatcaagccattagaaagcattagacctaagattttcatattatcggtattgatcccaagagattgggccattttttcgttgtcaccagtggcaataaaggcttgaccaagatcagtatcaaggaaaactgctagcaaaacgatgacgataatggcaatgatcaaaccaacaacaatagtaggaaaattgatcggtaatttttgtaaaagctgaccgtttagtaaagtatttttgttaagtaaaccaacattagccttgcctagaattctaagattaactgagtagacgccagtcatcgttaaaataccagctaaaagaacaggaatttttcctttagtatatagtaagccggttactaagccagtgaccatgccagcgaagaaggaaagaatggtagctgctaaaggattgacgccatgaactaaagcactaacacaaattgcggcaccgaaggggaaggttccttcaacagtcatgtctgggaaatttaaaattctaaaagttaggtagaggcctaaggctaaaataccccagagtaagccttggccaatagaagaagtaattaagctcatttgataattcgtcctttcttttgggcagcttgaattacactgttaggaatagtgatgtttaattcatgtgctgctttttcattgattactgtttcataatgggttacgcgtctgactggaagagcagcagggtttttaccatgtaaaatttgtcctgccatttgtccagttaagattcccatgtcgaattgactgacacacctggtagcgagaccaccacttttaaccatagtatcggcagcaggaaaaactgggatcttggcactgttagtagcctttaataaggtggcaattccactagctacagtattgtcggttgggacataaactgcttgaaccttgcctaccatggtttgggcaacttgttcgatatcattggttgaagtgatagtgtaagggataactttaagtcctgttgcttcagctagtcgtctgaattcacggtactctgatgctgatgaatcatcacttgaggtgtaaatgacaccgatgtttttggctttaggtagaatttcttgcattaaggccagctggctggcgattggctggcggtcctggacaccggtaattttaccgccgggatgcgctaggctttttactaaatgggccccaagaggatcgctgaccgcgcccataactacagggatgttgccagaagtattagctagagattggacagcaggagtggcaattccaatagttacagtcgcattttcctggctaaaacgatcgctcattgatttcagattactttgatcaccttgggcattttgaaaatcaattttaagattttttcctttgacatagccttcatctttgagaccctgaataattcctcgatgaatctgatctagagcggggtggctcattgtttgcaagataccgacagttggcgttttcttttccgcatttttcttatttacttcactgacaaatgcaactgccagaaaagcaaaaagagcaataattgttccgattaaccttttcattctttttctccttcaaacaaaaaaggcacttccttttttcgggaaatgcctaaaacaaaacccgcacgttattttccgtgcgagcaatatttcttgaagattttaccagcacagatacgatcttaatgagtcgcatctgtacttcacgaacagaaacaactctagtgctggaattgccaacgattgattgctgtaaatttaatcatgataaaatcttcctttcgttcaaatttgttagctaaattttaagtaattatgagaaagatgtcaaatgattttttgttagatttatttagttttgaataatttttaaaatgctataataattattccggcaaccatcataaaaagaagggaggaattctcttgcgctatcaacaaataatttttgatgtagatgacacaattatcgattttgcggcaactgaagattttgctttacatagcttgtttaacgctcatcactggcctttatctgcggaattgcagcggcagtatcattcttataatcaaggactttggcgccaacttgaacaaggtgaactaacttatgaagagttaagtgaaatgacttttcatgattttattttggatcattttggcattgagattgatggcaagaaggcaatggatgaatatcgttcatactttggtgaagcacaccaattattgcctggggttgaagatacgttgaaatttgctaaaaagcagggctataagctgaccgttttgagcaatggtgaaaaatttatgcaaaatcaccggttggagcttgctggggtgaaaaaatattttgacttaattgttacgtcagaggaagcccattattctaagcctaatcttcatgcctttgactatttcttcagtcgaactgagatcggtcctagtgagacagtcttttttggggacggcctacaatctgatattttaggtgcagaaaaatatggctttgatagtatttggtacaatcatcgccatcgtaaaaataccttgcatttgcatcctaagtttgtagtagaaacttatccagaattggttaaattaatgcagaatgattttgagaagaagtactaatcattatactttttgctcttcaagaagatgccccaaccaatagttaataagctgacaaaaattattaaaatccaaaagccgttttcattttctttacctggtaagccgccgacattcatgccccaaatgccactgattaaagcgggaagagcaattaccagggcagctgaatctagatatttcattaaatgatttaggtgactgtccatcatggcggtaaagaggccgctaatggaattgagcaagtcagtgtaaacgtgaatcattttggtaattcgtttttgcttggtcatgatacttttgacgcgggcttgatttgctagcttgttttctactaaataattaccaaattcttctagactaggtgtttgatcatctaaggtatgctttaagtaaactagctggcgagttaaatctgttactttttttaattctttggtcttagttgttcttcttgcagcttgatctaaatggtcaattttttgtttaattgttactaattctgcatgaagatgcttgatttggatacacaggctttgaaaaattgtttcaataatattttcttgcggttttaattctgaaagacttcttgttgtgccaataaagagatgattttggtcaaaaattgtaaaaattggaattagctcttgttcaattggcaagtcattacttaatagatcgaaactcactaataagtgaccattttttagtttattagaatcaatagggataaaacgagcaacctcaatcgaggaattagggtaagtgaaaattgtaggatctagatcccattttttgattaaatgatcgatatcgttttgcgtcaattgatcttttaaaattatattctgactattagtaagcatatttgttcacctctgtttcttttttagtttaagattaacatgtaatgttttttagactgaattaagttgacttgaaaatatgtttttttaaaaaatatagaaaggtgagaatatggaattacattcacttactgatacttatactttgaacaacggcgtaaaaattcctgtaattggtttcggtacttggcaaacaccaagtggagaagttgcaagagaatctgttgaagccgcacttgaggcgggataccgtcacatagatactgctgcagcttacggcaatgaagaaagtgttggcgaagcaattaaacgtagtggcgttaaccgccatgaattatttgtaactactaaattgtggaattccgatcatggttatgacaagactaaaaaggcaattgatactagtctagaaaaattagatttagactatcttgatctttacttaatccattggcctaatcctgtagctatgcgtgacaactgggcagagcttaacgctgaaagttggcaggcgatggaagaagcagtgaaggctggcaagattcgcgcaattggtgtatccaactttagaaagcatcacctggatgaattaatgaagactgctgaaattaagccggtagttaaccaaagttacttgaatccgagtgatttgcaaccggaagtaacggccgcaagcaaggaatatgatttgcttaatgaggcttacagtcctttgggtacaggtggtttattaggcaatgaggtagttaatgcagttgctgaaaactatggtaaatcaccagctcaaatcttgattcgctggtccttacaacatggctttttgccattgccgaagtcagttcatcctaagtatattgcggctaatggtgatgtctttgactttgagattagtccagaagacatgaagaagttagatggtttacgtggggcaagtaagttggctaatgatccggatgaggttaacttttaatttaatttggaataaagaaaattgaattatcacaagaagtatcttatttttgaagtaagatacttttttattaggtgagacaatgaagaaaattacaacaggaattgtagctcacgttgacgcgggcaaaacgactctttctgaggctctgctgtacaaggcaggaaatttgcggacgctaggaagagtagacaatggggatgcttttttagatacagatcaattggagaaaaaacgtggcattaccattttttctcatgaagctaaattaacgactgatgatttagaaattacgttgttggacacaccgggacacgttgatttcagtgcacaaacagaagaaacgctgagtgtacttgattatgctatcttggttatttcaattacagatggtgtaactagttatactcgcactttgtggcatttgctcaagcgatatcaggtaccagtttttatttttgtgaataaggttgatgcgataggcgctgatcgagggatggcgttggttgatattcaaaagaacttaagtgagagttgcgttgatttttcgaagattgatgatgaattttatgaaaatgtggctgccacaggtgatgccttgcttgagaagtatttggatagtggtgccatttatgatcaggacgtgcagaatgcaattgtgcagcggaaagtttttccaatttattttggttctgcgttgaaattaacaggaattacggaatttttggctggttttagtaaatggactaaggaaaaggaattctctgataagtttgcggcacgatgttttaagatctcacatgatgctaagggtgaacgcttaacttggttgcgaattttgggtggcagcttaaaggccaagactgagctagctggtgagaaaattaatcagttgcgtagttataatggtgaaaaatttgcgactattacagaagcagctgctggagaaattgttgctgcaacaggattgactaagacgtatccaggacaaggattcggcgtgggggatgcaccaactgcactgcttaagccagttttgacctataaagttaatccccaggataatgatcttcacgcttgcttaaaagctctgcaaaccttggaagatgaagatccacagctgcatgtgacttggtccgaacatttgcaagaaatccacgtgcaagtgatgggaaagattcaattagaaattttagaacagttaatgcaagaacgttttggtttgaatattgtttttgaacagggaagtattctttatcaagaaacaatcactaaaccaattgaagcagtaggccactttgaaccgctacgtcactacgcggaagttcatcttttactggagccactgccacgtaatagcggtattgtttttgaaaataaatgcagtttagaagttttgactaaaaattggcaacatcaaatcatgacggcattgaagtctaaagaacatcttggtgttttgacagcttcgccgattacagatatgaagattaccttgatcggtggtaaaggctcaattgtacattcggttggtggcgatttccgtgaagcaacttatcgtgcagtgcggcaaggtttaatggaagaaaagatacgccaacaaactattttgctcgaaccgtggtatgattttcgcttagaaataggaaaagatcaggtagggcgtgctttaaatgatattcagcgcatgaatggaaaatttagtacgcctgaaaatattggtgaacgaacagtcatatccggttctgcaccggtagctgaaatgcaagattatgcgacagaagtgcgcaattatacgcatggtgaaggtaatcttgaatgcgtagtcagtggctatttgccttgtcacaatgcggcagaaattattgaggaaaagaattatgatcccgtttctgatctggagaatacgcctaactctgtcttttgttcacatggtgcaggtcacaccgtcacttgggataaggtgccagagactgcacaatatccttatacttatccattagattagcatgataccatgaattgtttatcttgttacatgtgaaacattaaaaatgcggcatagtgcttttcttattaaaaagtgcaacttgaaataagcgaaatatttgactagttatgaaagaaatttcattttattagcaaaatactgctagaaaatcgcttgcatagtaagataaaggtacgatagaaaggtgataaaacatgacacaaataccttttaaagctgtagcggttgatctagatggcacttttttgaccgaaaaaaagacttttgatcatgcgctatttgcaaaagttttacgaaaattgcaagctaatcaaataccgtttatctgtgcaacagggaaccaactaattcgttcgcatgaatattttgacgagtttactaatgaagtagattatgtgtctgaaaatggggcaattctagaagccgatggcaaagtatttaagcggattgcgattgactatgatactgcacaaaaattgttacattttattcaaacagaataccctgaagcaatcattatggttagcgcacagcatcattgctatattttgacgagtatggatcaagcggataaagacgacattagaatttattatcgtgatgttcaggaaatcgatcagtttactgacattgatccagccgatgcgatcttgaaggtttgtctgacagctgatgatgaactggcgcaggtgattcaggatcggtttaatgaaaaatatggtgactgtattcgcggcactagcagtggtaatatgacaatcgacttggtgcataaaggcattaataaggccaagggcgtagacgatatgcttaagcattatggcattgcgcaaaaagatttgattgcctttggcgatggcgaaaatgatattgatatgcttaaggcatgtggctatagctatgcgatgaaaaacgccaatgcgaaggctaaggcggtagcaaagtatgaggcgccaacgaatgatgaaaatggtgttttgaaagttttggctaagtatttagatattgattaatttaatacgcaaaaaagacttgagaagtaattttcccaagtcttttagtttgctttattaactgctctgaaaatattaagtccgctaattagaatgatgaatccacaagctaaaatcagaaccgtttcaccagagctgtctaacaaaattccggcaacaattgaactaatcggtccaccaatagaggtactggtacgaatagtagttagcactctgcctaatatttcatcgtccgcagtaatctgaatcaatgattctgccaaaatattgtgaatactcgtcattagcccaaataagaaaattagtcctgtgaatatcaaccaattgttactgaagaaaattatcaaaagtaatggtactgcactagctatccaagtaaaaccaattgtttttacccgtacggataatcttcctgcaatagttgcacctattacaaagccaatcataaaactgatatagaacatactgtatagtcccgcttgaccattttgttgagcaattcttggcaacagaatggccattgctggcgtcacaaaagaatacaggattgaggaccagaagtaatgacttaagaaataatttgttttaataaacttatagccattaagaatttgattgaggtattttgcctctgcttttttgactttaggtctatctttaatttcttttagggcgtaaaacagaaaaacaaaactgattaggctcagtagactgcagatcaacattacattagctgaaattaaaaaagttaataaaaatccagaaagagcagttcccgctacattcacaagctggtcgatgttgctaactttagaaattagattatttaattcttggtcatcagccgttgtttcttttaaaatagcccggtcagctggattaaaaaattcatcgcagacagatactattcctgcgcagattaatgccaaaatataacttttgctaagttggtaaactgcaattgttgtggcaaataggaaaacagtttgaacaagaattgaatagtaacttgtccttttgaatgaataatgatcgataatggggccgtagaatattgataaggcggcagtggtggaaaagatggcttccgcaattccgacgacaaaggaacttttggtggaagtttgcagccaccagataaagaccatgctgaagagggaattagctagtccgccaacggcacgcgagaaaaaatatgatttcttttttaacattttatttatcctattctcatttttattttccaattataccaatatttttccaattaggatcaatttaataaaaatagtacaaaaaaagacttgagaagtaatttttcccaagtcttttagtttgtcttaatttaggttaattaaaacttgttcttgtccaaagcaactggagaatctggcttttcaccattgatcatcttcaagttgttgtcgaatgccttaacaaccatgttacgtacggcgtgggtggtgtagaaggcggtgtgtggagttaccaaaacgtttggacgatcaattaagtcagctaaacgcttgtctgggaattctttgccttcccaatcttcgttaaatacaccaacttcgtcttcgtaagtatccataacaaagccaaagatcttacctgagtccaaaccgcggataacagcgtcagtgtcaacaagtggaccacgtgagcagtttacaattacaacgccatctttcatcttggcaattgattcgtcattgatcatgtgtacatttgctggaacatctggtacgtgaagtgaaattacatcagcttgcttgtacaagtcgtcaagtgagtcaacgtagtaacccttcttttcgagttctgggttcttgaagatatcgtaagcaatgacctttgcgccgaaaccttccataattctcataaatacttgaccaatgtgaccagtacctacaacaccaacaacttggtcacgaacttcacgaccaatagtaggtgcccaacgtaagtcgcgcttagccatcttttcgtccatacgcttgtcttgacgtaatacacgagcagcttggattgcagcatgttcagcaatagcgtcaggagagtatacaggaacgttagtaatttcaaagccaagttccttagccttgtccatgtcgatgttgtcgacaccaacgttacgtaatgacatcttagttacgccagcgtctgccaatgcttgaagagtttctggggtgtagtctaattgttggtaaacaacaacaccgtcagcacccttagctaacttagcagtttcaggagtcaaaagcttatcagtgtaatctacatcgatatccttgtgagcatccttccattcgtttaagaatggttcttcgtctttacgaatagcgtaagcaaaaatctttgtcataaatttaacctccgtaaaatttattagtatgaccagtcctcattatacgcttttacttgctcaacaaaacacaaaagaaccatttttttgtatagattttaagaaaaataaaagtcaagttttactctgagcaaaaaagttgcaattttttcaaaaaaagtttatagcctaaaaattgcaactattattaactgttacctaatctcaatcccatagatatgaaaattatttttgtatatagcaatattagttaaaggtagtatatggatttgtataagagacgcattttcgttatataacccaggttatataatggactttaagtagagaaacaaacatagcggaggaaaattgaatatgcattttaaaggagaaagccaacagcatttcagcctaagaaagctgacaattggtgttgcttctgtaataatcgggaccacctttatgttttttggtggtcatgctgttcatgcagatgatttaagtagagatgctgagcaaaccagctcagttgttcaaaaacagagtagtgagaaaatagatgtagatgcagtcaaagaagctgataatgtttcaaatcaaagacaagacttacccagacggtactaagagtaccgcaactgttcctgtaactgtcattgcaccaaatgtaccagacgttatctacgtaccaaagggtgacaagtttccagacccaagtactgtagttactaactctaacgatatcaaggacaagattcctgacacgacttacacttggaaaactactccagatactccaaatactaaagtagtaattaactataaggctaataatcctggtactccagataccccagttactccaccagtggatccaggcgataatccagcaaccccagttaccccgcctgtaaagccagagcagaagccaacaacaccaactcctcatgctactaagacaccagcaaaggataatggtggcaagaagacagtagctagtgagcaaaaatctactttgccacaaacggggaagaaggataacgttgctttgactgctatcggtgtagctattgcagctgctggaagcttattaggattagcagatagcaagaagcatagatcttaatttgtaatatctaatttctgtttactaagaagcaagttgactcagataggagctagcttgcttttttgtctaaaagtttaaggatttctaaagacaaaaagcaaatagtgacgcattgtcaaaaagctgatattatatactcataacaaaaatacaacgcatcaaatagagatgaattgtaagaaggtaacaaatcttctaattccttattaatacatcctattgggcctttattaattcatacattgggtattgctttttgctggttgtcccctatgcaaccgcgaaagttaagattgataataagtccatcccctttttgcgaaggtaaagagtcaagaccccctgcaacatctcttgcgttgaatcttttgttaatcttgataatttatcttcgcaacattagtgatgagtaggctaatgtaaaaaaatctcgttattctcattcaacacaactcccttaaaagggctggtttagaaaagtcatctaaatcagtcctttttctttttttcgttataattaaacttgagaactaaaacaaaggggaagaaaaatgatcttaatttcatggaatatcgattcattaaatgcagctctgactggtacttcagctagggcggaagaaacgcggcaagttttaactaaaattcatgatgccaatccagatattattgcgattcaagaaactaagctgcgtgcaactgggccaactaaaaaacataaagaagtgttggctgaaaagttccctgagtatgactatgtttggcgctcttcagaagaaccagctagaaaaggctatgctggtacaatgtatctttataagaaaggattaactcctgcagtgtctgagccgattattggcgcccctgagccgatggatcatgagggacggataatcacactggaatttgataaatgctttgtcacccaggtttatacgccaaattcaggcagtggtttaaagcgactagctgaacgtcaagtttgggaccaaaagtatattgaatatctgcaaaaattagatgaaaaaaagccagttttagctagtggtgattacaactgtgctcataccgagattgacttgaagcatcccgaaaataatcatcactcagcaggttttactgatgaagaaagagtcgactttaccaatttgctcaatgctggctttaccgatacctttagaaaagttcatggtgagattactggcgtatattcttggtgggctcaacgtgtcagaaccgctaaggctaacaactctggctggagaattgattactggctagtaagcaatcgcattgctgataaggtggtccgctcagagatgatcgatacaggcaaacgagcagaccactgcccaattttgcttgaaataaatctttaaattgaagcaagccctagtataatttctttttgaaatgtttttattttgaaaaagaagtaggggttgaaattctttgaataacgagaaaaaagaagattgggctttggagcaggatctgaagtacaatcgtctgacagcatttaagctattcgcgatgactagttcaatggttatttccgttgatgaactcgcaccatttggtaaaactggagcaacggcactgttttacttgttaattgctggaatcgcttggtttatcccgattacgcaaatggctggagaaatggcctcaattgatggctgggaaaaaggcggaatcttcacttgggtgaaaggatctcttggagacaaaacaggctggacagcaatgttttatcaatggattcatattactgttggtatggatacgatgatgtatgtgatcattggggcattgtctatcacatttgggacaccttggttcaacaccacgccaatcgtacgcttcattttaatgatggttattctgtggggagcaacagcgattcaggtaattggtgttagaaagattggtcgaatcgctgaatggctgtttattctggggattgcgacaccagtaattttattgatcatttcattcttcgtatatgtgattcaggggcatcccttgcatatgacgattaactggaatactgtaattccacataaattgaatggtaatacattagttgcctttgtcccatttatgttggccttttgtggtggggaagcttctgcaccgcacgttaaaaacttggaccacatcaagtcatactcaaaagttatgcttggcttagccgttactgcaatctgcttcgacttgctaggtagtatggcaattggaatgactgtgcctaaggatcaaatagagaacagtacaggctttgtttatacctatggcaagctgttaacgtcaatcgggctacctggtgatctgttgcaaaaaattgtgggtataatgttagcctgcggtattattggtgagctaggcaactggattgctggtcctaatcagggaatgtatgaagcggctaaagagggctatatgcctaagttttttgctaaaaccactaagcacggcgtgccattaagaattatggttttacaatcaagtatcgttaccatttctgcattattgattacttttaccagtggtgccgatgcagattttgcgtttaacgtttcattggccgcaacgacggcgcaatatctcatggtttatatgattatgttgattgcttacatggttttgaaaagaaagcatgaagattatcaccgtatgtattacatgagcaagaaccctaatttgagtattgcaattgcggtgcttgcattaatcatcacggttatagctttctttgtaacttttgttccagcacaaggcacgccaagcaatttgcgtcacgtttatgtttggaccttaatcggcatgtgtgccattgtgtcgattttgccacttattttgtatcgctggcatgaaaaatggcaatcacaatagaattaagaagcattcgtttttcaagacggatgcttttttagtagaatttgagagaggtgaataaaatggcggatgcgatgagggatgcaatattaaatggttttgttgatcaaaattatttaggaagtgaagaattaggtcctaaaatattagctaataatcagcaagagagaatctggcagaatttgcgccaggaattgtatagttgcaagtcctttacttgggcggttgcgtttattacgcaagacatgctagttccgtttaaggtgataatggcagatttagcgaaaaatggaattagtggcacgattattactggtgattacttgggttttaacaatccgcgtgtttttacggaattacaaaagattcctaatttagaagttcgtattgctaataaggcaggtttccatactaaaggatatttatttgatcatgaaaactatcaaactgtgattattggcagtgctaattttacacgttcagctctgctggctaactatgagtgggctttgaaagtaagttcaaaaaagcaagcagatttaacagctcaattagtggataaaattgcagatttgaaacaggatagttttgttttaaattcagcctggctaacagattatcgtaaaaattgggtaaagcctgagcgagttgctactgatcggcatcagacaaaaattttaccaaataaaatgcaaaaagcggctttaaaacagatagaagcactagttacaagtggtgaaaaacgagggctagtagtgtcagccacaggaacggggaaaacttatttaggtgcttttgctgttaagaaatatcagccgcggcgttttttatacattgtgcatcgtgagcaaattgctaaaaagtcattagaaagtttttatcgtgtaatcggtggaccaagatcggattatggcttattaacgggaaataggcacaatttacaggccaagtatttatttgcgacggtacaaacgataagtcaacctgagatgctggctaattttaatagcgatgaatttgattatatcttgattgatgaagcacacagggcagctgcaccttcgtatcagcgccttttacattattttaagcccaatttttggttaggaatgacggctacgcctgaacgaatggatgagcaaaatgtttaccagatttttgactacaatttggcatatgaaattcgtttgcgggatgcactggaagagaagatgctggcgccatttcattatgttggtgtccaggattatgaagcagacggagtagtgattgatgaaacaacagatttacgctacctagcttctacatctcgagtagactatgttttaaaggaattagactattacggctattgtggaacaaaggctaaaggcttggttttctgcagtcgacaggatgaagcacgtgaattagcttggctttttagtcaaaaaggacatcccgctgtagcattgaccaatgaggataatgaaaaaagacgtaatgaagtggttgcgtctttagttaaaggtgagattgggtatattgtagcggttgacttgtttaacgaaggaatcgacatccctgccttgaatcaaattgtgatgttacgcaacacacagtcgagcatagtgtttatccagcagttaggccgggggcttcgtaaatatcctggcaaagattttaccgttgtgctagattttatcggcaattataaaaacaattacatgattccgttggcactgaatcaggatacttctcgaagcaaagatcaagctaaacgagaaacgcgtctgccaagctttattgatgtttcaacgattaactttagtaaaattgccagtgaaaaaattttggcttcgcttgatagtgtcaagcttgatgggatgcgtgaattgcggcagagttaccatgatctcaagaacaaactagggcgtgtaccgctactatttgatttttatcaatatggctcagttgcaccgattgtttttgcacaaaatcatggcttggcaagctatgctgactttttgggtaaaatgggcgaagacgttaatttatcaaaatatgaaaatgaagtgctgtcttttgtgactaaggaattacttaatggtaaaagaattcacgagttacttttgttagagatgctacttgaacaagatattgttaagcaagaagattatctagctcaattgaaacgacaccatgcttatgtaaatgatgaattgttagcttctgttgatgcgattttatcgctagatttttttgatattaagcagggaaagactaccaaaaaagcacaatatggtaaattgccgttagttgaacgtagcaatttatttgactatcaattgaatggttctctacgctctgccctagatcaacatgattttaagaatttatttgttgatgctattaaaactggtttggccttaaatcaggaatatgataatcagcgtcaatttactttatatcagcaatatgatcgtaaggacgcttgtcgactcttgaactggcctaaggatgtttcggccccgatgtatggctatcgtgttggtgagcaggacacaccaatcttcatcacttatcataaagatgatcatgaaaagcggaatgctctgtatcgtaatacattggctgatgggcgcagtttgcgctggtatactcgggtaccacggcatttagattctgatgaggtacagcgtttgcttaatacgcgagggatgaatttgcatatatttgttaaaagaagcgatgcagatggtaagcagttcttttatttaggcaaggcaaagattcaagctgattctgttcgcgaagaattgctcggtgttaagaaaaagccagctgtagggatgaacttaatgttgaaacatccactgagtgagtcaatgcatgagttattatttgaatagaccaaaaaagcctttccgcttaggaaaagcttttttaattgccgctaatattaattagatcttggtcatcttggttattatccttatcaaacattctaggcttgatgtgatctagaatcttagtcccgatatttttctgagcagtttcatcaccgctaacctggtttaaaaacataattattccatatcgattatctgtagtcattttgatccaattaccaaaatgagtgttgcttaagctaccataagcagatttagtatggtcatcatctaaatgaagccctccagaataattagtggttgcacttttaagatgagttaagtaatagaaatcggatttgcttaagatactaccattggttaagccaagctggatcttgtaataatccattggggtagtgaacatattgcctgcgcctggaagctgggaggcaagagtctttttaacgtattcagcgtcttggtaatttttaccattattccagacgtaagagataggatcggttttccaactaggaatatcctgataaaggaatgtattagcaagccctaatttgttaatgatgcgattattgaaattgttttcgtaggattgtccgctgattttaataataattccggctaataaaagatagttggtattattgtagaagtaggttcctggtgtcccttgagtgccgttattagtattatcaatagcccaattgatggcgtcattctcacttaaaacttttccgcgatccaattcagtattggttgcttgaatgccagaagtatgggtcattaactgtccaatagtaatattatcggcgtttttaagattagggtaccaacgtgaaattttggtgttttgcgtaaatttttgactagtgtgccagttttcattcatcagctgaattatcattgctgctgtaacaactttttgcaaagaagcagttggataaactacgttgtcgttcccattaccaacttttttaccgtaccaagcgtagccatagctgatttgttgcggctgaccgtttttgataatgacgatactaccgcgagtattgttttgagccaaagtattgcggacaaaatttcgcatttcggttttaaagtatgaactggcttgaacttgtggtggttcagtgatcgcaaatgcaggaactgtcgttagcagcgcagcggtagctagtccaataattgattttttcaaaaattaaaaggcctcccttaaaaagtggtttgtttacattttagcgcgttctttgcatcggacaaactattatcttggtgaaaagacgtatttttagctagcttgttgaaaaagtgcggctaattttgctctgagtgcgggatcatgagcgtataaataggtaccgcggattcctcgcttgaatagaacgttgagtgaattcatgaccatcttctcttcatattctattttttcttttgagttggttagatcattacgctttttgaacatctcaacatctgtaattttgtctaaattaactttaagttgattggtgcggggaatcaggctgattggtggaccgataatgatgccagcataatttaggtcaaaaccttggcaagtatagatagaaccaacttcattgattgttgtaggaatttctgcccaaggagttgatgtgtagttgtattgatcccatggcagcataaatttcccttctttaatgtaatgtttgccaccatcaagagtagatggatagccggaagttgaaagaattcttgccaggccgtctgtttgatttctcttgacgatttcttgccgcattttttctgcatcagtaaaaatacgaaagtcgtagttgtgccacatttctttttttaagggcattaatttattatgtgtaaaaaagttaaaccattctattagactatctggtgccatcattctaaattgatgatgtagttgatagtcttcgtggggataatgatgagtaattgcttcaagtcgcttacgtgtccagaagcttttcattcgtaaaacttggttttcatcaaataccaaaatgataacttttgaccgcttaataacctcctctaattggttatcgtgataaaagttgttgtagtgatcaggctgagataagagcaagtgtgcttcatcaatgacgacaacatcagcactggtttgttttttgtccatctgattaataaatgaagttggccgcatataatttttcttatatagttctttaatcggcccagcaatctgcttatagacttttagcagttcagggtgatttactaaaaagtagttttgagttttatacagttggctgcctgtttggtggtttaatttttgcaactgatcaaaaagggcagaaagcactacacttttaccagtacctgcttcaccataaatagtgaaaacagcaggatgatttttattgctgcaatgtgtaatcgaaaaatgtaaaattttttgtacgagaagtgattgctcttggttgagctgatggtaaggagagagtttaaaacttgcttgattattcaatatttattcacctcgttttcaattataatgaatagaaataataatgataaaggaagaaaacatgactgcacaaaaaataattcacaatcggctatttttaagacaaaaatctgatttagctggcaaaaatgatttacaagttgcgataaacttgcgtgatacgctactagctaatcgtgggaaagctgcggggctggctgcaaatatgattggtcagactaaacaaattattgcgttttatgctggcccgcttccatttgtaatgctgaatccgcgtattattcaaaaaaagcagatgtatcttgctagtgagggatgtctgtcactagaaggcgagcgtaatgttcagcgctatgaagaaattactgttacttatcagaatatggagttagaaacagtaacgcaaacttttggtgactttatagctgaaacgattcagcatgaaattgatcattgcaatggaattctgatttgaatagtagaatatttacgtgattttgcaaaaaaagtaaaaaaatttaaattaattttgcatggtttcagggatgaaaacccacaattttcgaataattagatttgatagaataaaatactttttaatttaatgcaaagataaagaaaaatatattacaacactacctagtgtatcgtgaagaacccgaacgaagagcaagacttgccaaagcggagaaaataaggtaaattaataaagtcgcttcgagagatgcgacgagagcttaaaaacagacatgcaaggaaagaaaacaaataaaaagaaaaaagtacttgcaaagaagtaaataagctggtaatatatttaaatgtcgtcaggtgaaagcagaaaaagcttgagtaagacgaaaaaacaaatcaaaaaagttcttgacaaagaaatgatggtttgataaaatataaaagctgtctgctttgcaaaaaagcaagacagaggtagtactttgaaaactgaacaaagtttcgctaaaagtgtgcgggtgtaaaaacccaaacaagaagcgaagtcaattcgcaagcaataaatttgagacaaagatcttaaataaggaatgagcaatcattcaaactttttaaaatgagagtttgatcctggctcaggacgaacgctggcggcgtgcctaatacatgcaagtcgagcgagcggaactaacagatttacttcggtaatgacgttaggaaagcgagcggcggatgggtgagtaacacgtggggaacctgccccatagtctgggataccacttggaaacaggtgctaataccggataagaaagcagatcgtatgatcagcttttaaaaggcggcgtaagctgtcgctatgggatggccccgcggtgcattagctagttggtaaggtaaaggcttaccaaggcgatgatgcatagccgagttgagagactgatcggccacattgggactgagacacggcccaaactcctacgggaggcagcagtagggaatcttccacaatggacgcaagtctgatggagcaacgccgcgtgagtgaagaaggttttcggatcgtaaagctctgttgttggtgaagaaggatagaggtagtaactggcctttatttgacggtaatcaaccagaaagtcacggctaactacgtgccagcagccgcggtaatacgtaggtggcaagcgttgtccgaatttattgggcgtaaagcgagcgcaggcggaagaataagtctgatgtgaaagccctcggcttaaccgaggaactgcatcggaaactgtttttcttgagtgcagaagaggagagtggaactccatgtgtagcggtggaatgcgtagatatatggaagaacaccagtggcgaaggcggctctctggtctgcaactgacgctgaggctcgaaagcatgggtagcgaacaggattagataccctggtagtccatgccgtaaacgatgagtgctaagtgttgggaggtttccgcctctcagtgctgcagctaacgcattaagcactccgcctggggagtacgaccgcaaggttgaaactcaaaggaattgacgggggcccgcacaagcggtggagcatgtggtttaattcgaagcaacgcgaagaaccttaccaggtcttgacatctagtgccatttgtagagatacaaagttcccttcggggacgctaagacaggtggtgcatggctgtcgtcagctcgtgtcgtgagatgttgggttaagtcccgcaacgagcgcaacccttgttattagttgccagcattaagttgggcactctaatgagactgccggtgacaaaccggaggaaggtggggatgacgtcaagtcatcatgccccttatgacctgggctacacacgtgctacaatgggcagtacaacgagaagcgagcctgcgaaggcaagcggatctctgaaagctgttctcagttcggactgcagtctgcaactcgactgcacgaagctggaatcgctagtaatcgcggatcagcacgccgcggtgaatacgttcccgggccttgtacacaccgcccgtcacaccatgggagtctgcaatgcccaaagccggtggcctaaccttcgggaaggagccgtctaaggcagggcagatgactggggtgaagtcgtaacaaggtagccgtaggagaacctgcggctggatcacctcctttctaaggaagcgaaggatatggagagcaggaatgctaagagaagtatccagagcaagcggaagcacactgagaaactttgtttagttttgagggtagtacctcaaaaagagctagtacattgaaaactgaatataatccaagcaaaaaaaccgagacaatcaaagagaacagattgtagagcgaccgagaaaagaattcttgagtaaggtcaagtagaaaagggcgcacggtgaatgcctaggcactaacagccgaagaaggacgtgacgaactacgaaaagcttcggggagcggtaagtacgcagtgatccggagatatccgaatgggggaacccaatgcagagatgcattattgattagtgaatagatagctaatcaaaggaagacgcagtgaactgaaacatctaagtagctgcaggaagagaaagaaagatcgatttccttagtagcggcgagcgaagaggaaagagcccaaaccaagtgatttatcatttggggttgtaggactgcgacgtggcagtgtaagagatagttgaattatctgggaaggtaagccagagagggtgagagccccgtaagcgaaatctcaagcacgcctagcagaatcctgagtaggccgggacacgaggaatcccggttgaaaccgcgaggaccatctcgcaaggctaaatactagttagtgaccgatagtgaaccagtaccgtgagggaaaggtgaaaagaaccccggaaggggagtgaaaaagaacctgaaaccgtgtgtctacaagtagtcaaagcacattaaagtgcaatggcgtgccttttgtagaatgaaccggcgagttacgttatctagcgaggttaagtcagaaaagacggagccggagcgaaagcgagtcttaatagggcgaaaagttaggtgacgtagacccgaaaccaagtgacctacccatgaccaggctgaaggtgtggtaaaacgcactggagggccgaacccacgtaagttaaaaattgcggggatgagttgtgggtagcggtgaaattccaaacgaacttggagatagctggttctctccgaaatagctttagggctagcctcgtggagaggataatggaggtagagctctgtttggactaggggcccgtcaggggttactgaatccagataaactacgaattccagatatccatacacgggagtcagactgcgagtgataagatccgtagtcgaaagggaaacagcccagatcaccagttaaggtcccgaaatctatgctaagtggaaaaggatgtggagttgcgtagacaactaggacgttggctcagaagcagccatcattcaaagagtgcgtaatagctcactagtcgagtggcgctgcgccgaaaatttaccggggctaagcatagtaccgaaactgtggatgtgttttaaagagcacgtggtaggagagcgttctaagagcggagaagttgaatcgagaggatcaatggagcgcttagaagtgagaatgccggtatgagtagcgaaagataggtgagaatcctatccgccgaaagactaaggtttcctggggcaggctcgtccgcccagggtaagtcgggacctaaggcaaggccgagaggcgtagtcgatggataacagatagagattcctgtactgtgtcaaatcgttaagagcgaaggagggacgcaggaggtgaagcacgcatcgcgatggaacgatgttcaagcaacaagtgcggttaagagtcaaatgcttctaaccagcaacacgagttgtgaagaggagtgaattaaaagtagcgaaggtgtggtaatcacactgccaagaaaagcttctagccagagatgacatacccgtaccgcaaaccgacacaggtagtcgagtggagaacactaaggtgagcgagagaactctcgttaaggaactcggcaaaatgaccccgtaacttcggaagaaggggtgctagccaagagattggttagccgcagtgaataggcccaaacaactgtttatcaaaaacacaggtctctgcaaaatcgtaagatgacgtatagaggctgacacctgcccggtgctggaaggttaagaggagagcttagcgtaagcgaaggtttgaattgaagccccagtaaacggcggccgtaactataacggtcctaaggtagcgaaattccttgtcgggtaagttccgacctgcacgaaaggtgtaatgatttgggcactgtctcaacgagagactcggtgaaattataatacccgtgaagatgcgggttacccgcgacaggacggaaagaccccatggagctttactgtagcttgatattgagtatcttttaaacatgtacaggataggtaggagccagagaagataggacgctagtcttattggaggcaatgttgggatactacccttgtttgaaggatgctctaacctcgacctgtaagccaggccagggacagtgtcaggtgggcagtttgactggggcggtcgcctcctaaagtgtaacggaggcgctcaaaggttccctcagaatggttggaaatcattcgcagagtgtaaaggtataagggagcttgactgcgagagagacaactcgagcaggtaggaaactaggacttagtgatctggtggtaccgtatggaagggccatcactcaacggataaaagctaccctggggataacaggcttatctcccccaagagttcacatcgacggggaggtttggcacctcgatgtcggctcgtcgcatcctggggctgaagtcggtcccaagggttgggctgttcgcccattaaagcggcacgcgagctgggttcagaacgtcgtgagacagttcggtccctatccgtcgtgggcgtaggaaatttgagaggagctgtccttagtacgagaggaccgggatggacgcaccgctggtgtaccagttgttccgccaggagcatcgctgggtagctatgtgcggaagggataagcgctgaaagcatctaagtgcgaagcccccctcaagatgagatttcctttgcgtaagcagtaagacacctcagagacgatgaggtagataggctgggagtggaagtcctgtgaaggatggagcggaccagtactaatcagtcgaggacttgaccaaagcgaagcaaactggaaggttttttgcgagaaggattatgtttagttttgagtgtaaaagctcaaaagagtacggtggcgaaagcaagaaggatacacctgttcccatgccgaacacagaagttaagcttcttaacgccgaaagtagttggtgggcaactgcctgcgaggaaaggaagctgccgtgctcttttttaatattccggcttagctcagttggtagagcgcttgactgttaatcaagatgtcgtcagttcgagtctgacagccggagtaaagggaagaaggaagcggaaggcttcctttttttgtgccttttgggtatgttaaaaggttaattaggctaagcaagcatgacttgagggtcaaatttaatataatcattaatagaagacatagtaaaactcctaacaagcttaattgaattgattacggaggctatgctctctttttaagtgcataaaaatcgaaactgtcaaatcttttgtgtaaatagatctttctcgtaaattgattttttaattatttatttaatcaaagtaggattctaaggtgtcctgaacctgaccaaagcctttatgaattcgattgaaataacggtcattgtagctcattgcctgaataccaataaaagcatcaagcgactgttcagttggaaactctgccttaggcttagctttacgcttgatgacgttgttaaaggattcaatcatattggttgaataaattgaagctctgatttgtttgggataattgtagaagactagcagatcgggctcaatttccttcaaacctttgatgacatggctataagctttattccatttggcatagaatttgtgcaagacagctgcagcttcttttttgcttgtctgttgatgtatctgcttgaattcgttcatgatcttttcacgatcgtcgacgcgtactttagcgcagatattgcgcatgacatgaaccaggcagcgttgaaaatgagctttaggataagtcctggccaaggctgttttcatgccaacaacaccatcagaaagaaaaagctcaacttgcttcaagcctctggacttcatgttttgaagcatctctgtccaaacttcaatgttctcactaggagcaatgcagtagtcaatgacttccttatgtccattaggtttaatgccaatggcaatatagactgcttcacgctcaaacgtttctcggcgcaaaggaaggtatgtcgcatccaaatagacgcagaaaaacttgtcgcttagcttgcgcttgtgataagcctcaaccttggggagcatctgcttggaaatatttgatacttgagctggactataatgactgccatacattttctcaatcaagtcagcgatttctctggtggttacgcctttggagtagagcttgataatcgtgctttccaaaacatcagagtgctgcttgtagtcaggcagcgtgtgctgatgaaactgaccgttgcggtctcgaggcacttgcacttcaattggtccaaactgcgtatcaaccttgcggaaataagcaccatttctagaattgccagtattccagccatttctggcatagggatcatagcctagaaaggcagtcaattcagcttctagcaagttattaacagcctgttgtagctctttgcgcaataaatcatttattttgtctggattgaatagagcttgagcaaaatctttggtaaaatcattcatgaaggagttcttctttctgtatgtgttttttttgttcaaaccaatcatacgagaaaggaactcctttttctaatgtttaaagaaataaatttaaggaatcattcatccttacacaaactattttacagtctctaaaaatcttatagatagattattataaatattcaacgacagtaaaattaggtaagcaatctatatctaggaatctgttggggttctgattgtagtaggctaattatacaaaaatgagttaacaaaattctgatcagaattagtacggttaagattgaaaaaatagctggtaattattactgtatctctttgtaattaggtaacaatgctattttttacttctaaaatataattaaaccggtcagacaattcgtattgacctgaatttggataaacagttataacaaaactatgtgtgcaaagcagatgacaggaacttttaattgatctcgtatgttggagcgcgctgtgttgactatttgttctaagtgaacagatgacaagcatgcctctatctaagtaccaagatctaggaaattcattctgaagtagttaatatgtgtcaatatgtcgcacaaaggtaactatgaattacagcaacataagagaaatttgaaaaatagtttttaaattgtggcttgttattagtgaaaatgataaattaaatattattttggcagaaaatacagcttaataacaaaaaataaaaatattttttgcttacctttaaaaatatagttcgagatttataaagtttttaacgagttaaagtgatatttctataattgaaagcagattctactaatgtaattactataatcagaataaatatttcataaaaatacatagaacccgaacgaagagcaagacttgccaaagcggagaaaataaggtaaattaataaagtcgcttcgagagatgcgacgagagcttaaaaacagacatgtaaggaaagaaaacaaataaaaagaaaaaaagtacttgcaaagaagtaaataagctggtaatatatttaaatgtcgtcaggtgaaagcagaaaaagcttgagcaagacgaaaaaaacaaatcaaaaaagttcttgacaaagaaatgatggtttgataaaatataaaagctgtctgctttgcaaaaaagcaagacagaggtagtactttgaaaactgaacaaagtttcgctaaaagtgtgcgggtgtaaaaacccaaacaagaagcgaagtcaattcgcaagcaataaatttgagacaaagatcttaaataaggaatgagcaatcattcaaactttttaaaatgagagtttgatcctggctcaggacgaacgctggcggcgtgcctaatacatgcaagtcgagcgagcggaactaacagatttacttcggtaatgacgttaggaaagcgagcggcggatgggtgagtaacacgtggggaacctgccccatagtctgggataccacttggaaacaggtgctaataccggataagaaagcagatcgtatgatcagcttttaaaaggcggcgtaagctgtcgctatgggatggccccgcggtgcattagctagttggtaaggtaaaggcttaccaaggcgatgatgcatagccgagttgagagactgatcggccacattgggactgagacacggcccaaactcctacgggaggcagcagtagggaatcttccacaatggacgcaagtctgatggagcaacgccgcgtgagtgaagaaggttttcggatcgtaaagctctgttgttggtgaagaaggatagaggtagtaactggcctttatttgacggtaatcaaccagaaagtcacggctaactacgtgccagcagccgcggtaatacgtaggtggcaagcgttgtccgaatttattgggcgtaaagcgagcgcaggcggaagaataagtctgatgtgaaagccctcggcttaaccgaggaactgcatcggaaactgtttttcttgagtgcagaagaggagagtggaactccatgtgtagcggtggaatgcgtagatatatggaagaacaccagtggcgaaggcggctctctggtctgcaactgacgctgaggctcgaaagcatgggtagcgaacaggattagataccctggtagtccatgccgtaaacgatgagtgctaagtgttgggaggtttccgcctctcagtgctgcagctaacgcattaagcactccgcctggggagtacgaccgcaaggttgaaactcaaaggaattgacgggggcccgcacaagcggtggagcatgtggtttaattcgaagcaacgcgaagaaccttaccaggtcttgacatctagtgccatttgtagagatacaaagttcccttcggggacgctaagacaggtggtgcatggctgtcgtcagctcgtgtcgtgagatgttgggttaagtcccgcaacgagcgcaacccttgttattagttgccagcattaagttgggcactctaatgagactgccggtgacaaaccggaggaaggtggggatgacgtcaagtcatcatgccccttatgacctgggctacacacgtgctacaatgggcagtacaacgagaagcgagcctgcgaaggcaagcggatctctgaaagctgttctcagttcggactgcagtctgcaactcgactgcacgaagctggaatcgctagtaatcgcggatcagcacgccgcggtgaatacgttcccgggccttgtacacaccgcccgtcacaccatgggagtctgcaatgcccaaagccggtggcctaaccttcgggaaggagccgtctaaggcagggcagatgactggggtgaagtcgtaacaaggtagccgtaggagaacctgcggctggatcacctcctttctaaggaagcgaaggatatggagagcaggaatgctaagagaagtatccagagcaagcggaagcacactgagaaactttgtttagttttgagggtagtacctcaaagatttgaaaaacgccaagcgttagtcgggcctatagctcagctggtttagagcgcacgcctgataagcgtgaggtcgatggttcaagtccatttaggcccattgacataacgaagaaaaagagttaaagttatgtctggccgaaaataaaatactttgggggcttagctcagttgggagagcacctgctttgcacgcaggaggtcatcggttcgaacccgttagcctccattgatccagaaaaaggatcaaagagctagtacattgaaaactgaatataatccaagcaaaaaaaccgagacaatcaaagagaacagattgtagagcgaccgagaaaagaattcttgagtaaggtcaagtagaaaagggcgcacggtgaatgcctaggcactaacagccgaagaaggacgtgacgaactacgaaaagcttcggggagcggtaagtacgcagtgatccggagatatccgaatgggggaacccaatgcagagatgcattattgattagtgaatagatagctaatcaaaggaagacgcagtgaactgaaacatctaagtagctgcaggaagagaaagaaagatcgatttccttagtagcggcgagcgaagaggaaagagcccaaaccaagtgatttatcatttggggttgtaggactgcgacgtggcagtgtaagagatagttgaattatctgggaaggtaagccagagagggtgagagccccgtaagcgaaatctcaagcacgcctagcagaatcctgagtaggccgggacacgaggaatcccggttgaaaccgcgaggaccatctcgcaaggctaaatactagttagtgaccgatagtgaaccagtaccgtgagggaaaggtgaaaagaaccccggaaggggagtgaaaaagaacctgaaaccgtgtgtctacaagtagtcaaagcacattaaagtgcaatggcgtgccttttgtagaatgaaccggcgagttacgttatctagcgaggttaagtcagaaaagacggagccggagcgaaagcgagtcttaatagggcgaaaagttaggtgacgtagacccgaaaccaagtgacctacccatgaccaggctgaaggtgtggtaaaacgcactggagggccgaacccacgtaagttaaaaattgcggggatgagttgtgggtagcggtgaaattccaaacgaacttggagatagctggttctctccgaaatagctttagggctagcctcgtggagaggataatggaggtagagctctgtttggactaggggcccgtcaggggttactgaatccagataaactacgaattccagatatccatacacgggagtcagactgcgagtgataagatccgtagtcgaaagggaaacagcccagatcaccagttaaggtcccgaaatctatgctaagtggaaaaggatgtggagttgcgtagacaactaggacgttggctcagaagcagccatcattcaaagagtgcgtaatagctcactagtcgagtggcgctgcgccgaaaatttaccggggctaagcatagtaccgaaactgtggatgtgttttaaagagcacgtggtaggagagcgttctaagagcggagaagttgaatcgagaggatcaatggagcgcttagaagtgagaatgccggtatgagtagcgaaagataggtgagaatcctatccgccgaaagactaaggtttcctggggcaggctcgtccgcccagggtaagtcgggacctaaggcaaggccgagaggcgtagtcgatggataacaggtagagattcctgtactgtgtcaaatcgttaagagcgaaggagggacgcaggaggtgaagcacgcatcgcgatggaacgatgttcaagcaacaagtgcggttaagagtcaaatgcttctaaccagcaacacgagttgtgaagaggagtgaattaaaagtagcgaaggtgtggtaatcacactgccaagaaaagcttctagccagagatgacatacccgtaccgcaaaccgacacaggtagtcgagtggagaacactaaggtgagcgagagaactctcgttaaggaactcggcaaaatgaccccgtaacttcggaagaaggggtgctagccaagagattggttagccgcagtgaataggcccaaacaactgtttatcaaaaacacaggtctctgcaaaatcgtaagatgacgtatagaggctgacacctgcccggtgctggaaggttaagaggagagcttagcgtaagcgaaggtttgaattgaagccccagtaaacggcggccgtaactataacggtcctaaggtagcgaaattccttgtcgggtaagttccgacctgcacgaaaggtgtaatgatttgggcactgtctcaacgagagactcggtgaaattataatacccgtgaagatgcgggttacccgcgacaggacggaaagaccccatggagctttactgtagcttgatattgagtatcttttaaacatgtacaggataggtaggagccagagaagataggacgctagtcttattggaggcaatgttgggatactacccttgtttgaaggatgctctaacctcgacctgtaagccaggccagggacagtgtcaggtgggcagtttgactggggcggtcgcctcctaaagtgtaacggaggcgctcaaaggttccctcagaatggttggaaatcattcgcagagtgtaaaggtataagggagcttgactgcgagagagacaactcgagcaggtaggaaactaggacttagtgatctggtggtaccgtatggaagggccatcactcaacggataaaagctaccctggggataacaggcttatctcccccaagagttcacatcgacggggaggtttggcacctcgatgtcggctcgtcgcatcctggggctgaagtcggtcccaagggttgggctgttcgcccattaaagcggcacgcgagctgggttcagaacgtcgtgagacagttcggtccctatccgtcgtgggcgtaggaaatttgagaggagctgtccttagtacgagaggaccgggatggacgcaccgctggtgtaccagttgttccgccaggagcatcgctgggtagctatgtgcggaagggataagcgctgaaagcatctaagtgcgaagcccccctcaagatgagatttcctttgcgtaagcagtaagacacctcagagacgatgaggtagataggctgggagtggaagtcctgtgaaggatggagcggaccagtactaatcagtcgaggacttgaccaaagcgaagcaaactggaaggttttttgcgagaaggattatgtttagttttgagtgtaaaagctcaaaagagtacggtggcgaaagcaagaaggatacacctgttcccatgccgaacacagaagttaagcttcttaacgccgaaagtagttggtgggcaactgcctgcgaggaaaggaagctgccgtgctcttttttaatattccggcttagctcagttggtagagcgcttgactgttaatcaagatgtcgtcagttcgagtctgacagccggagtaaagggaagaaggaagcggaaggcttcctttttttgtgccttttgggtatgttaaaaggttaattaggctactattattggatattcatttatcatttaaaattgatctgggtgccgttaatcggattaacaggctatgtaattaggttatatcaccgattattgccacagaataaaaaatcttcaaattataagaatatcggtattatatcagtttacaaagtaatatttataatgtttgtatgtgttaaacgcaatcaattatatgattataatgtaatcatcagtaattaaagactgtagttgaatcaaataattaactcagcgtataaaatgctgagttagacaaaaaaacaacgagcaattctctcgttgttttatggattcattttgatcaaatttttagtttatctttagttgtaaataccaacttgattaatgtgggccaattccagaactggagattgagcgaagtccagactaacatcacagccagcatggataccattattttcgccattaagccagtgggtattattagttacgtcatagacagtaccattaaatgcaatataagctggacgtccatttttaccattgtaatttgatagagtttctttagtaaattttctcatataagaagctcctttctaataagatcttgatatattaatggtaacactgtgtcaccttatagcaagagatacgaaggagtcttatgcttttcttatgaaaaatgaccacgccacccagcaatatcccaatctagaaagtcataattaagctttttaccataaattttctcgtaggcagcaactttttgtcggtagtcgagttccatcatcttatgagcgttttcgttggcgtttagagaaacgtcagggaagattggtggtaaaacatggacaatatatttggtctcataaaaattaggatctttcttttcgattttaggtagatccttaatctcgacaaaagtggagattaccggtacattttgtttagccgcaaaataataggcaccacgttgtaatttgcgaggcttgcgataattccaccacatctcctgttctggataaattaaaacccaattatttttagctaaagctgcactgaggtgcttaggaaattcatttccaatatagctaggactctgaactagtggaatagtgccaacataattcattaaatagcggaaaaatcccggtagcattaggttagtatcttcaattacaattgaaagttgatggtgcatcttgttagcgagcagcttcattggtaaagaatcaacctgattgtagtggttagaagttaaaattgcgccaccaataggtaaattatttaggttctctaaacctacaaattcagttgatccagctaatgctctggataaagtaccaaataagagatgtccaatacgattattaagcttacttgaaaaagtgttacgcttattccaataatcattgaccaatttaaggcgctgatctagggacatttggggatcgccgatttctacttttgctgtgaagttgcgttcattagcagctttttttatatttttaatcactgcctcacgattatcgccaaaaatcatagtgttactgcctctcgtttcttaacttttgcccaattattaggatcttgctcagttttgtcttccttagcaagcatatgatccaatttttcgcggtctgctgcacgctcgtcatcagtataattattgagttcgttctttaattcatcgaaaaactgcgtttgtttggcactatcccagaagtactgtgcatattggacattagcaaaatgccatggcttaaagaaaagattatagtgaatcagaccaggattagttaaaggttcagtgttttcatttggcatagcatcccagcgaggatttaagtgcaaaattctaccttccccgatttcatttaaatagtcttgatcaggagcaatacaatcaaaatgatacttttctaaaagtgtcataaaatggtcaataaaatgttcagcgcgaaaggccctagcattcatgacgagcatgccagagttaatgtatttcttggggtcaagtgccaggacatttttgatgtattttatcatcttgtctacatattgaattgaggagtcggtgcaagcagcaaataaattatcacccaattcggagttgtatagtttagcaagatcgtcgtttacaattgtgtcgctatcaatatagatcaccttatcatattcgggaaaaagttctggaataaagaggcgataaaaaatcgacatggtaaaaaagtcagcgcgaagaaagttttccttacgattttgaataggttgtacaagttgattatcaatatggaaaaacttcacatgaacgtttggactgctaagatcagacaaagctttttgatgctttgatgagagattttgatttaaaaagtaaacagtataatccttatttggatctgtatgtttgactaaagaattaagagaaacagcagcgtatttggtaaagtcatcgctgatactgtaaaaaataggaattgtcataaaattgcctttcttagattttaactgattccgtttgtttaaccttagcccaagtatttggctctttgacaatcatgtcaactttttttgccatccattctaggtcagctcgggccttttgacggtcttcatcagtaaagttgtctaattgctgctttagttcatcgtaatacggcgtagttttagcaacataccagaaataatgaccatattgaacatcagcaaaatgccatggtttgaagaaaagattgtagtgcacgatcttaggatcttgaatttcaggaatgctttcatttggcatagcatcccattctttaggtaggtgataaatcttatcttcgcaaatttcattcatgtaggcttgatcagggtcaacgttatcgaaatgatatttattcattaagtaatagaatttatcaacaaactttttgtctctaaaggccttcatattaaacagaattacaccattattgatgtatttttctgcaggaaaaattccctgacattctttaatgtacttttgtaaaagtggcatgtaacgaattgataagtcgggacatgaagcaaacatgttgtcggcgatatcaatttcatacattttagcaatatcagtacagataatagtatctgcatcaagataaactgccttgtcatattgagggaacaattctggaatgaatagtcggtaaaaaattgacatagtaaagaattgagcacgcaagtagttttccttagtattgtgaattggcttaaccatgtcatcgtcaatatgaaagatttgaacatgaatattatcagttgaaagatcttctaagctctttttgtgctcatcagatatctgttggactaaaagggtaatcgtatagtccttcttggggaaactgtcaaatcttttgtgtaaatagttctttctcgtaaattgattttttaattatttatttaatcaaagtaggattctaaggtgtcctgaacctgaccaaagcctttatgaattcgattgaaataacggtcattgtagctcattgcctgaatgccaataaaagcatcaagcgactgttcagttggaaactctgccttaggcttagctttgcgcttgatcacattgttaaatgattcaatcatgttagtcgaataaattgaagctctgatctgcttgggatagttataaaagaccagcagatctggttctatgtctttcaagcttctgataacatggctgtaaaccttgccccatttggtatagaagtcatgcaggacagctgtggcttcttctttgtttgtctgttgatgcacctgtttgaattcgttcatgatcttttcacgatcgtcgacgcgtactttagcgcagatattgcgcatgacatgaaccaaacagcgttgaaaatgagctttaggataagtcctggccaaggctgttttcatgccaacaacaccatcagaaagaaaaagctcaacttgctttaagcctcgggatttcatgttttgaagcatatctgtccagacttcaatgttctcgctaggcgcaatgcagtagtcaatgacctccttgtgcccattaggcttgatgccaatggcaatatagactgcttcacgctcaaatgtttctcggcgcaaaggaaggtatgccgcatccaaatagacgcagaaaaacttgtcgcttagcttgcgtttgtggtaagcctcaacctttggaatcatctgcttggaaatatttgatacctgagctggactgtaatggctgccatacatcttttcaattagatcggctatttccctggtggtcacgcccttggagtaaagcttgataatcatgctttccaagatatccgagtgctgcttgtagccaggcagcgtgtgctgatgaaattgaccgttgcgatcccgaggcacttgcacttcaattgggccaaattgcgtatcaactttgcggaaataagcaccatttctagagttgccagtattccagccatttctggcatagggatcatagcccagaaaggcagtcaattcagcttctaacaagttattaacagcctgttgtagctctttgcgcaataaatcatttattttgtctggattgaatagagcttgagcaaaatctttggtaaaatcattcatgaaggagttcttctttctgtatgtgtttttttgttcaaaccaatcatacgagaaaggaactcctttttctaatgtttaaagaaataaatttaaggaatcattcatccttacacaaactattttacagtctcttcttggggtcagtatggtcaattaatgatttaattgaaacatatgcatatggcgtataattatcgctaattgtgtaaaaaacaggaatggttttcaaaataagatcctcctaaattatttttttaaattatttcgtaatttgagatattcgttaagcaaatcatcatattcatgtaaatgaagtacactgtgtacgcgatcaacatcccatggcttaactgtttgagtatggaaataaggccaaaacctaaagctagtagtgaaatgttgaattttggtgtttttttgcaaatgatattgctcattataacggcgtggtgctactcgcttggctacagctagcttgtttattgctgattggtcgggcaaaaacatttgcttaacctgcatcatatgccgcatctcggcaaagagatcagtttgcttaattttcttcatattcagcaacaaaacgccagaattaagataatcaaatgcgcgcttggtcttaagattgtggaagaagaagcggccccaataatcaagtacgcccactaattcgattccggtaatatcctcattgtaaaaagttgtaatatcaccgcgaatgacaatgtcatcgtctaaataaagaatgcgatcaggaatctgtggcaattggtctgcaaataaacgcaacatagcatatggcgtgaagcgagtattcatgttagcggttggcggttcctgttcaaataacttggtgcagtcaattaattcaactgtactgttaggattggctttttttactaaagaacgtaaaaaatcagccgcatgttgtgagaaagggtgatatttacgttcatcactgtgtgcctccatcgttaaaatataaagatgcaattcttgagcaccagaatttttgattaaagataaggtggaaatcaaaacgccatcttgagcattttcatctccacaaaaaagaatattcatgataaactcctattttttatttcttttgaatatattgacaatattcataatcgctattttttgcacgctgcttcattacctgccaaatttcatcgtgaagcttattttgagcttccttacggcttaaatttgtatccgggtaaaagggcccatcaatgtaaataacggcactaggccgcttgctaagccactttttatggtaggttttggtcatgacgaaactaggcgcatttaatttaactggaaagtgcatgcttgttgcatcgaacgggcgaatcttcgtgtaatagggccagacatgagcttcagggtagatgagaatctcgccctttttatccttaatcacagtttgaatggctttaattagtttgagcgattgcttcatatttttgccaacaggcagaccgccgtagcgtacaagatatttgccaatgaaggggatgccccagttagcttgattagcaatagcataaaaatttttgattggaaaaattgtgagcgaggtaaagacatcccccatgggtctagtatggttgccataaataaaatagcccccattgacttgcttaagtttttcttgaccaacgacttttacatgatcgaagaagcggaaaaccacccaaccaaaagtgcatgctaagtgacgagcggtagtggaccagattctagctccaagagaattaggtagaataacgtaattatcgggtagactgaaattttgatcgtgactatcgactacatcatcggttgttttttggtaataataaatccgtttcatcttgccctccatgatacttatgtatcctatgataccatggaaaaaagcctaattcctaagacgagaggaatgctgaaagaaaataaaaaagattcgtaatttcatgatcgaaaaatacgaatcctctgtaaaatagcataaaaaaagcaccgccttcttgcagtgcatctttcatattatgggtggccaggggatcgaaccctggacccacggattaagagtccgttgctctgccagctgagctagccacccatatttgttcatcagctcccgccgacatttaaatatattaccagtagttttataatttgacaagctttttttgaaaaaagttgaaaaataatttgaagctagcaaaaagcgcccataatggccgcttttttactaaagtttatcttgaatatgataggctgtgccttgctgatcctgcttcatgtgatctgcatagtaaacagcatagacaccgctttgatcatttttggcaatcacaatttggcgccctgttggacgttctgccttaatgatttgagcactgcggcgtgcttctttaaagtcgtgtgaagatgcgatggcatcccctggattaaaaaatacagcttcgttcattgtaaagccccctcgtacaaattctaattttattttaccaagaaagccctttctaaatccaatttaagaaacaaaaaagagataagatcaacatcttatctcttacgaaaaatattatgggtggccaggggatcgaaccctggacccacggattaagagtccgttgctctgccagctgagctagccacccatgtcgttgaatcaatcaacagatattattatgctattgttgataagaaaatgcaagctttttttgaaaaaaaacaaaaatttttggctaatgttacaaaattcagtataatgtaagggcaaaggaggcattcccgatgccaaagaagattctcgtcgtcgacgatgaaaagccgatttctgatattatcaaatttaatttaactaaggaaggctttgatgtcgacaccgcctatgatggcgaagaagctgttaaaaaagttgacgaatacgacccggatctaatgattctggatttgatgttgcccaaaaaagatgggttggaagttgcgcgtgaagttcgtcaaacgcatgacatgccaatcatcatggtaactgctaaagatactgaaattgataaagtcttaggactggaaatgggtgcagatgactacgtaaccaagccgttttctaaccgggaattagttgcccgtgtgaaggctaacctgcgtcgtcgtgatattgttaaaaaagcagaagctgccagccaagaagagaccgataagaatattaagatcggtaacttggtcattatgccagatgcctatattgtagaaaaaaatggtaagaagattgaacttactcaccgtgaatttgaacttctttactatttagctcaacatatgggacaagttatgactcgtgaacacctgcttcagactgtttggggttatgactacttcggtgatgtgcggactgtagacgtaacggtgcaccgtttaagagaaaagattgaagataatccaatccaacctcaaattttagttacccgtcgtggtgttggctattatgtaaaacagccgagtgaagaataataaagaaagccacagaactgttatggtagtggctttcttttttatattttttagatattgaatgagtagaatgaaaaaattcaaagcaagattaaatagtacatttaattccattaatactaaaattgcaattgtgttcatgctgatgctactggcaacaattgaagttattggagcttattttacccgtcaattagagcaaaatagcattgaaaatttccaatcatcaatccagattcagactatcgtcagcaatcagttagctaatcagttgaccagtgataataaaaatactaatgatcgcttgaatcaaattgttaatgactacaataatgatgcaattagtgaaattattgttgtcgataataaggatacgattcgtgccgtttctaacttaaatgataaaagtaagatcggtcaacggattaacaatactgatgtgaagcaggttatttcaactggacatcaaattaataaagtggtcgatgatcatggcaattacatgattcaaatatcgccgttgactagtggcaatggctctaacaatactgttggtgctgtctatgttaaagctagtatgcaagatgtctttaacaatttgcgccaaatttcattgactttcttgattgcgtcattgatcgcggctttattaggtgcatttttgtcattggttatttcccgggcaattacgcaaccgatcgaagaaatgcagaaacaagcattgcatattgctgatggtgattattcaagtcaggtaaaaatttattccaatgatgaactagggcaattagctaaagcatttaataccctgtccgtacgaattgaacgctcacaagaagagtctgatagtgaacggcggcgactagatagtgttctgtcacacatgagcgatggagttctagccactgatcgtcatggtaacgtcagtgtggttaatcatatggcactaaactttttaaataaaaaagaagacgaggttatcaataagccgattgctgaagtactgggactagaagatacttcgtcacaagatttgatttctagtcaaaaagagatcgttattacccttgatccaggtacgcgggatgaaattattttgcatgctagtttttctttgattaagcgggtaactggctttgtatcagggtcagtttgtgtattacacgatgtaactgagcaacaaaagaatgaagattcacaaagacagtttgtttctaatgtctcacacgaattgagaacacctttaacaagtttgcaggcttatattgaagctcttaatgagggtgcttggaagaatccagagattgctcctaagtttttggaagttacccaacaagaaactagtcggatgattagaatgatcaatgacttgttgagtttgtctagaatggaccgtggcgtttcaaaaatggatctagaatttgttaacttaaacgattttgttaaccatattcttaaccgtttcgatatgattgttaaaacagataaaaataaagaaaagaagaaatacacaattaagcgtgaattaggcagtcaagccttatgggtggaaatcgataccgataagatgatgcaggtaattgataacattatgaacaatgcaattaagtattcacctgatggcggtgtaattactgttagaatgacccaaaaccaaaatcatgttatcttaagtatttctgaccagggcttgggtattccaagaaaagatctgggtaaaatctttgaccgcttttaccgagttgataaggcacgttcccgggcccaaggtggtaccggcttgggcttggccattgctaaagaaattgtggaagctcaccatggtaaaatttgggctgacagtagcgaaggcaaggggtctactttctatatttccttgccatatgaaccgatgacagaggaggatgattgggatgaagtttaaattcaaattcggtgaatttttcttaggcttagctacactgatcgtcattgtcctctcaattgtgctttggatctttattatgactagtgatcagcgctttagtaatattggtcagcaaaatcaaaataatatcactaaagagcaaacgcgtagtcacaattttaagtcattatatgatttatatattccaactacttcatatggttttgctaatggaaatttgtgtcagctatatgattcaaaaaataatttgactttagaatttaccaaagagataaaaaaagccaaggccactaataaaattaagaaaatagttgatactagaactaaatatgaagagtatttaaacaatcccaactatgtgcagttggtttatccagatgaaattactttctccttatttaaccagttgaataatgccgcaaatgataaccgcgagtttaaccgcttctttatctcgcagtcaaatcactggatttatttgggaaatgatcagactaatgaaatttatcaagtaaaaattgctggcgcaaattttgataaactacgtaaatatgcacgtaatgctaagagcaagtatccagttagattagttcgtttaaaggaaggctattcaccgttttacatcaagacaatgaatgctaaagtttatagttacttgactaatcatcaatcgtattcttactttgtttcgcgtttattaggtacatctggcgttactagtaagactaataagaatggtcaaacggtatattctttgaactactatactcgcttaagagtgccagattctaattcaggtgagcataattatctttatactcattatgaaaaaaataagatccccaatactactaaccgcttattagatagcgtttattatgttcaccaattgggtttaaccgagcaagatttacgcttctttgatgcagatggtgctaatgttagttatctaaactatattgaaggtattcctgttttcttaaataagcatgatttgcaagtcaagacgaccttttcaacagattcgattaatgtggcctttaatagtgtaaacttccaaattccaattccgtttgatggtcaaactaagcggttaaaaccaacccaagatgttgttgatgaattagtcaatcacggcctaaagcaggaagatattcaacgaattatcgttggttttgctgaagaaaaggattcaagtcaccatagtttgattaacttgatcccaacgtactatatcaaagcctacgatgaatggaagagcctaggtgaatgggaaaagcaagacgtatctacctaccgtgaagctgatcagttaactgttaacgaagggggaaaatagaaatggaccataaacgaatcgaatggctatttttcgttgttttctttttaattgatatttatcttggaatcgaaattctccgttctcccgttaatttaagtaacgctgataccactactcgtagcgttgctagcatccgcaatgaaatgaagtcagacaatattgatttgcccgataagatttcggatgcaccagattctggttattatttagctaccaagaatcgtgactatctctctggcaaagttagctcgctgactaatgtaaatgcccgctattctaaaagcgataatgtgctttatggtgaaccaagacaagcagtccttttgagtaaaaaacctaaggaagctttagaacaaattgaagattttaagaatgattcgaaaaatattccttatggtaaagaattcaagtatgaacctgatatgtcgagtgaagacaattatgtttttgtgcaaaactcagattatggtgaaatttatgctaactcggcccaattgaatatcaatgtaaaagataatcagattattaattttactgaaacatatatggggcaagctagtccagtgcgtgaattacagtcaaccatcagtgcttggcgtgctgtgcgtgcgatgtacactgatcgtgagttgactaataattcgcgcgtaacgcaggtaaaattaggttactccaaattgacagaagtacgtggcagcacaatcttgttgccaacttggctggtttgggtagaaaataagacaactaaaaatatcacgatgaaacgtattaatgcatatacggcacagatgctacaatcgagtacctataatgtagaaaagtagaagggacaaaaattgaaggtttccgttttagcaagcggctcgaccggcaataccagtttaatcgttacaggccagcataaaatcctgatggatgctggcatttctggtaagaaaactaaagatttgctagccgaagttggagttgatattaacgagattgatatggcctttttaagtcatgatcataccgatcatagtggcggactcggcgtgttgatgcgccgttatcctaagatagatgcttttgccaatagtgggacttggcagtatttattggatacgaaaaaaataggtaaattaccggctgaacaaatgaatacaattgaaccaggccaaactaaaacttttggtgatgttgatattactgcctttgcaactagtcatgacgcagctgagccgcaatattatgtgtttactagtggtggtaagcgggtcgcttttttaactgatacaggttatgtatcagaagaagttgaagggacaattgaagatgctgatgcctatatgatggaatttaattatgataatatgatgctcagagatggaccatattcctgggcactgaagcagcgaattttgtcggatgtaggccatttatctaatgacgaagcagcccaggcattagttgatgtagtcacacctaaaacaaagcatatctttttagcgcatcgcagccaacataataatacggagtatttagctcacgaaacggcaaaggaaatgctgcttgagggggatgcgaatttggatgatgatgttaagattattgatacagaacctaatcagcctacaaaattagttgaaatttagcagttttcacaacattttttcatataatattcaaatttaatcggtatgattagtaaacaagatgaggggagaagcaagcatggtagaaaatcaaaataataataacaatttacaacaacctagaaaaaagaatactaatggtaaaatcattgccactgcagcgattgtcggtgtagttggtggcttgatcggtggaggcgtttcatattacgcagctgatcaaatgaataatgcatcagttaataatggtgccgctcaaactagtgtatcttcaagtagtagtaaagtttcagaaaagagtgctaagactagtggcacaatgactactgcatataatgatgtaaaaggagcggttgtttcagttattaacttaaaacgccaatcaagttctaatagtactaattcactttataatagtttattcggtaatgatgacagtgatgatagctattcatcaagcagcaagggcaagcttgagacttacagtgaaggctcaggtgtagtctacatgaaatctaatggcaagggctatatcgttactaacaaccacgttatctcaggcagtgatgctgttcaggtaatgctagctaatggcaagacagtaaatgctaaagttgttggtaaggatagtacaactgacttagctgtgctttcaattgatgctaagtatgtgactaagacggccgaatttggcgattctaagagcttacaagctggtcaaactgtcattgccgttggttcaccattaggtagtgaatatgcttctacggtaacgcaagggattatttcagcaccggctagaaccatttctacttcatcaggcaatcaacaaacggttattcaaactgatgccgcaattaacccaggtaactcaggtggtgccttggttaactcagctggtcaagtgatcgggattaactcaatgaagttagcccaatcaagtgatggtacttctgtcgaaggaatgggctttgcaattccatcaaacgaagtagttacgattgtgaacgaattagttaagaagggtaagattacccgtccacaacttggcgtaagggtaatcgcacttcaaggtattccagaaggctacagaagccgcttgaagataaattctactttgaagagtggtatttacattgcctcagtaaacaagaatagttcagctgctaatgccggaatgaagagcggcgacgttattaccaaggttgacggcaagaagattgatgatgtggcatcgttacacagcattttatacagccataaagtcggtgataccgtaaatgttaccgtgaacagaaatggtaaggatgtcaacttaaaggtaaaacttgagggtaactaaaaatcaaaatagaagttaattaaaagaaaaaaggctatatcacgcggtttaaacgtagatatagcctttttgttaactttttaaatgtgtaacatcaaattgttcggaattatttgttgtcaaacagacactagcctgttgataagtgtggataactctgtggattgtgtataacttgataaatataggtttattaacttgtggaaaaatatgatgattttgaccttatttagtgaattctatttgagaaaacaggcgttcatgcaggcataacaagccttaagagataaagtttgtgaaaaaaggctttcataaaatcgatgtgaataaagaaattttagaaaaattattaaatacaacttctggggtataagtaaaataataccacaaaatgttgaaattggtctttgaagttttgtggaaaagtttgggtaaatagtgtggaagggatgttagtattgtgctggtagattaaaattatgaatggaaaattagctatgcttgttataatagaagcatgaatatcaaaattgtatgtgttggaaaattaaaagagaagtattttagggatgcaattgcggagtatgagaaacgactcagtcgttttgcaaaggtgtccattgtacaggtgcctgatgaaaaagcaccggaaaaattcagtgcagctgaagatgagaaggttaaagagattgaaggtcagcgaatcctgagcaaaattaaagataaggagtacgtgtatgtgactgcaattaaaggaaagcagcgcagcagcgaagagttcgctaaagagattcaggatctcgcaacttatggtcattcagacattacgtttgtcattggtggcagtttagggactagcgatgctgtaaacaagaggggaaatgacttgattagttttggtaaattgacgatgccacaccagttgatgcgcgtggtgttgattgaacaaatctatcgtgcatttatgattaactcaggtagtccttatcataagtagaatatagaaaaagcccataaattgggctttttatttttgcatatttgcagatttcacaagcatattgaaaaaaactgtggcaggtcagtgcttttttagttttttatgatttaaaaatagattttgttaaattatgtttggcaacaaaaaagacgatctttcgatcgccctgataatttttgagctaccagctagtagctcacgcacacgctgaagtgtactttatctttgtagtatctcaattttaacacataaatggtaaaattaaaactgcacgctgaagggggtaagtgtcaatgtttttgcggtagcctttaaaccattagtctaaccttaatttcttaaatatttatatgacttaaatttctgcttagcttgcttaaataactattgccagctacctgtgcggttaatgcgccatgctggatgcctaaatgaacttcatgacgcttctttaagctgtcacgggccgctgcttttaattcctgttcagtcaatacagttatttctgaatcttcaaactcgctgctaagccaaaattccagctctcgattcttgatgcagcttaagatcctaagcatgccttctgctccagattttgaccatttcttgccttgccccttaacacggtaggtatacttgcggtggttgctctcgcagcagccaatggctttagtcacagtcagttttcgtttcttaaacggcttaatatcgtcccaatgacgatcaatataattccttaggcgccccagataatcatgattgagctcggtattcaattcatcaattagtcggttttctgcagtggttaggatagttttaactttgtcatagctgtatttgtattccaaagcagaaatcagcttgccttgcaggtcaggcgcaaaatatagcctttctttgattttcttatttaggtgaaagacatccaagaaatgctcatgacgcttgcatagccctacaatgtcatcgaagtctgttttggcatatccagcaccgccatcggcgttgctaagaattacagtatcagaaagatcataagtattggccaggtactccttggcttcgttcagcgcatcaagtcggcttaaagaaacaaattccttggcattgattcgctttctgcgtttcttgcttatattgacaatgccttcacagacctgatagcgatgaaattccaaccggcttttagtgcctttgatcaccacgccatcgccttcaagatacaaaactgggacctttttcttagtgcctgcggcatcatatcttgaatctgcttcttggcccgctttaatatttttcccggccatttttaccaaattgcccacctgcatatggctaatattaaagccagacaggcaattgactgctagagcagtattgcgataagtggcaacgctgcttacttctaagatgtttttgactgctaaaatactgtagcgcttgtatttgtcaaagcccattaattcatccaagggataccttgcttgtttgcctgggcagacatatcttcttctgacatacctaacttcgccaaaagccatattgattgagcgctcattcttcttatcaatctgatagccctgtgctttaaccttggtaatcatttcatcatcaactttagctaaagccaaggccatgatttccttaatcaggtttaagaagaaacagattatttttctttcacgcttaatataattatcttcagactttataatatttgcgatttcagttacaattgaattcataaaagaccagcttctaatgtgttttttgttcttaacatcagactactggtctttttgtttgagctcaagtccaaattcaaaggacttgggcttttttaattatttattcaacttaccgtaaaaaattatacacttagctgaaggggtagcgcccttactcgtgtggaaggaggtagactcaatacagccgtccttcggggcggctttttttatgatgaaaatggcaagtcattgggtgaaaagtattacgcatatcgtgcagtaactgtaaatcaaagtcccataacaattaatggcgctaaattctacaagttggctgatagggatgcttatattaaggtgaccaatattagtggtcaaggtcgcgttttaaagcgtaacgcctacatctacagtacatcaaaaaaaacgcactacgcataacggtgcttggaagttgtacaaaggctccacagtgacaacttacggtggttcatacaagtttaagaatggcaaacgctattacagaattggcggacctgctaagcaatatgtaagaacatcaaactttaattagaagttgaatatcatttacgacagcaacataatagttgctgtttttttgcctcaaaaaccatagaaaatcttctgtaatcaaggtaaaatgaaattgattttacaaatatcatggaggatgttggaatgagaaaacgatggacagcagctgttattgctgctttagttgccgtaagtactgccgcaactactgttaaggctgacgatactaacacaacagctaatactaatgagacgcaagtaactgcaactagtgaccaaactaattctgattcagataaggttacttataacaaggcagattatttgtctgctaaccctaaattagtgcgaattaagcatgcaactactgcttataaggatgctgcattgactaaatcagcacagagcgtaaaagcaggatcacactttttaattagtcgaattgttaaatctgacaaccaagtaccaatactaaagactagtgatggcttgtatttgcctgctaaaaaatctttggtaactaaggtcatagcctaccaaaatcctaagggttatcatcaagtacattacacacaagttaaaccatacggtaaggtgggttataacttgtaccgtggctatgagggtattaagacttggaaagtaatgcatagagttggtacttgggcaggtacgaattactataaccaagctacttataacgcagtaaagaacttccaacgtagtcaccacttgccagcaactggtaatgttaacttagctacttgggaaaagatgggcttttctaagaagtcatggtatagcattgatagttatgttgccccacttaaggcttatgcttggcaagggcgtaaagctcatattgaagcaatgattaatcaagcttacaaatatatgggaaaaccatggttagcaggttgttcaactagtccaagctacggtgttgattgttctggtttggtaatgcaaggtctttatgcaggtggcattagtccagttccaactagttcaatcggccacgctcatccaggcaatgaatggaattcacgtaatctttgggctgacaagcacctaaagcgtgttccatattcacaaagacaatgtggagacttagtgttctattaccaaccaggtacgcacactatttggcatgttgcgatttacttaggcaataaccgggtaattgaaagctggccaccacgtgtgatggttcaaccaattgttaattcacaaagaaatgtaattgctggtattaagcgaccatttatttaaggaaaaatatgaaaaaatacttagctattttattagtcagcctgggctttagttcattattgttaactcgccaaacagtacatgccgctgataatgatgatgccgcgacaactaatcaatcggctcctaagtatactggccttaaaaaagttggtaaacattatgtctattttgatcaagcaggcaagcaacgttttaaaaataccaagactaaaaaagcatattattggattaataaaagcggcaagatagttggtattaataactacgccaaggtaattagccaactacctgaaatgccaactggttgtgaaattactgccgtgacaatgatgattaattttgctggtaaaaaggtaactaaacagcaggcggccaagattatgccgcgcagctctaaccctaacaagggctttatcggttcgccttacaagaaatatccgctcggctattgggttgctcctaatggggtgaaaccagtagtgaagcattatcttggtagagcacagaatatgattaattgtggtttgcccgcaattaaggataagctgattaattcacacttggtggttgtttgggtagggatgtttgacggcctctctaaccatgctattaccttgacgggttaccatggtaaaacgatctattataatgatccttggactggaaccaagcggaaaatcaagcaggaaatttttgcaacgcattgggctttagatgctcatcgggcgttgagttattaattttatgtaaatatatttactttttagtcatgttgatcaagccactttcgcagcatttcaacatattcatctgttttttctacaaaagacatgtgaccgcagttttcaaatagctgccatttactgccagcaagctgatcctgcatcgttttagctacataaggtgtacataaatcatcagtcccactcgtaattagagttgggatttttattttgcctagtttttctgtgtattcgtaatcgtgcaagttgccctctggcgtatattcatttggtccccaggcggtttcataagctacaataccaccacatttttttcgcataacgcattcaggccacgttttcgtcatgtcaattgcatgttgattcatgaagtgctcattagcttttaagtaatcaggatcgttaaaattgctagtcaattcggcgcgacgaattgccgcctgttcttcaattggcaagtatttaatcatccggtgtaattctttgctccataaggaagcagacgacaaggttgaagacaagatcaagctttgaatgccaacaggatgataatcacacatgtagattagtgctagcatcccgccccaactttgtcctaataaatgtattttgcgcaaagccaagtgctcccgcaacgccatgagttccttaacccatgtttctttagtataaagttcagggtgatcatcagggatgctactcttgccgcagcctaactggtcgtacatgataatccgtcggttatcaatttcggctaatttgtccaaaacctcaaaataattatgacttgagccgggaccaccatgtagcaatacgagtggtgtcttttcgcttcttcgaccaacaatacgatagtaagtttcatagcccatgaaaggcatttttccttcgataacttccattttttacctatttgaacaaaaacaatgagatattaaccaaaattagcagggtaaagaagattacccaatctctagctgttaaaggaatagcgatgatcgtcgaccttctttgcccttcgacatagccatgtgattccattccttgggccagattgtcagctgaatttaaagcaacaagaattgctttaaaatagaggaccggcgaccaaaaactgagataaatgccccgcatcatagcgctagttcggatctgtttaaccgccatcttcatctgcggaataatgttaatcgccgccagcacgccgtaggcaaatttactgggtaagtgcaggttctgctctaatgatcgggcaaagtctgtagcggtgttattacgtgtcacgcaggcaatcgtcaaggtataaacatagatacgcgttgacaaattccaagcataataagcatttggtgttggtgaaaaccaaaagagcgttgcaaagattgtaaaagcagcaataaagggcaagataatgagcaagattaactctttgattttgattcgagtaataattaaataaactagcgcgaaggtgattactaacaaattagtaactaagctagcttttaaagatatttccagggaaataataaatgctaaaagaaattttaaactaggattcataagcttatctttctacatattttaagcgctgatccgcaaaaatcaggtggtaatcgcaaaattcagctagctcgtctatctgatggctaatgataaaaaacgtctggtggagcttttgctggctttctcgcattaattctaaaacgagtttgaccgagttatggtcaagtccactgagcggttcatcaattaataaaacctgatgcttagtcattagcattaatagaatctgtaatttcttctgttggccacctgagagagaataaacaacttggtctaagtgtttggctaaacccaatttatctagccattcattgaccttttcttcagtaaaaaataaatttctatcctttttacttaattctagttcatctttgacagtcacagctaaaaattggtcgcttgctttttgaaaaatttgagctacttgtgttaaatattttctagctgagatttgagcgatttccttatttaaataagcaaaattaccagtatacggaatcattttggtcattactttaaataaagacgtcttgccaacaccattagcaccagtaattagggtagtgccagaatgcaaatttagctcattttgcttaagcaaaagcttgttttgtctaatttggacttgttttaaagtgaaaataggctcactattaggtaagacaaaatgataatgtcgctcatgcaattttttattttgttcaaataaggctatttttttgctagcatttaattcaataacttcttgattatttgtaaactcaaaaagatggtcgcagacaggttcataatcgtctaaaacgtggtcacttaaaataatagtttttccgttgtgagctaaaatcgctaattttttaatcaaaaaagcacgtgtcttaggatcacaactggcaaacggttcatctaagagcaataaatctacatccatagctattaagacagctaaagcaactcgttgttgctgaccgcctgatagagtattaatcttttgatcgagaaggtctgcaatttgggtgaaagctgttgcctgatctagtcgtgtttgatactcaccttcatctaactgtaaattttctaaagcaaagacaatttcttcacgtggagttggcattgtaaactgttcagccgcattttggaacatcattgccgccttttgtccgtgcaggtccaccatacctgttagtcgccctgcatatttgggatacaaaccagcgataattttgagtaaggtagatttaccgcagccggtcggtccaattaacagagaaaaaccatggggaatttcaatatttagatgattgataataggttctttttcataagaaaaagtaagattgttaacggttactttcataagcttgattgtacaagatgctttggggactgtctacaggtaaagtttgttataagtagaacaaatcataaataatacttaatactaaataaagttttgatttataatgtaattatagtgttaccatattttatttaatttaagtcatgtggtaataagtcaaatgaaaggcgatgatatttgttctttttgatcataaatttgagtatatgaaactaagccttggtaaaggttgatttttttaatgttaaacttttgtttacttttaaatttagaccaatttttgaaattaagacctcggtgtcctgtacagtttgtcatctttgagcaatttaaagataactcgtactaattttcttgcagttaatgtgcaagcacgtttatgcggcgagtagacagcttcatcatacttcttttggtaatattttttgaaaacaggatcatgtaatcttgctagattggcagcttcaatcaagtaatatcttagatatctgtttccagtcctggccattggagtatgttcgttgctgtgatctcccgattgatattgattccaggttaggccggcatacttagccagctgttcttctttatcaaagcgatcgatacttccgatctcagcgataataccagctgtataggttttgccaataccgggaattgattccagaattttgctttctggtaatgcatcaacgatacgatcaattgctttttctagatctttaatagatccattaaagctttgaatcatgttgtaatgaacagaaagcactgcatcaattgaatcagtcattactttgcctaagcgatatgaacctctaacagctttcttaattgctttagccaaggtatctggatcggaaaagcgtcctctgcctttaacctgtaagtaagaaattaagtcttcggtaggcatatccgcgatctcatccagagttttactatcggttacaatagacatcattgtagcaccgaaaagaggagtattaatcttatctttatcgacagtgattagtttattaacccgataatataaagcttcaatgaagtgctgtttggtacgagtcagttcttgaactaattcatatctggtacgcgttaaacgctctaaagcaagatagttgtcttgtctggcaatgcttactcgataatgtccaaagcttagatacaaagcaatgtaataagcatcgagaggatcagttttactttcttcaaagactttatgaaacctgctggtttctttggggttaattacatcagtctctacattgagcttttgtaaatcttcgtcattttggaaaaagtaagcaggatgaaaactgtaaatagatgtagcttccatgccaataatgatttgatcatagtgtttattttgagctagatctaaaatttgttttttcagttcactagcaccataaagatcattgacaaagctatcgttaattaagcgtttgttttgatcttctgaatcaagtgcaacgacctgtaaatctttagaactaacatcaataccgacaaataatttcattggaaatggcctcctttctttcaaatttctgatcatagattttgatcttcacatgttaacccctaattacagttcttaagttcaatctcgccagtataagtattcactggttgcttctttgaaagctgcacctaatcccaattgctcaaggactagcaaaaagaagcaatcaatacagcatgtgagttagagcataaaggaactgtctgggtggcagacttataaagcagacaaaactgcaggaggtgataacctagaccagttgaccaaagccaatgacaattagaggctaacatgtgaagatcaaaaagcaaatactaatttgattaattatcacaatatgactaattacaatttatataatacgaggaaggtggacatatggcagctgttgctttggaccaatatctggcaagtgtattaaagtcaaattcaacagataagaatgaaataaagttggaagctggtaatccagattttgatctgtttactatctaccttgaaaatcataatactggtattcatcgctatcggatggatgtttcaacgattttatatattgctaagggtactgtgacaattaagagtggtgaaaagatcattcaaatgaagtctgggaatgttttgctactgactgaaggttgcaagtatgagattttaagtcaaaaacctgatacggtactgataaagttgaagtttaagcgtggatttctatatcgcaagtattttaaagattttagctgtaagggagaacgtgaggttaaagttattgagcaaatcgttgatagcttagaaaatgaacatgttctttggctaaaaaataatcaaattactcgtgcgtctcaagtgatgcaacatattattggcggttatttgaataatgatttgtttactaaagctttaattcaggctgagttaaccactatgttgattatttcaattagaactcagcgcatggcaacaccgactagtttggataaaactaagtttgaaaagaagaccttagataattacatcgatcttcattttgccgatgtctctttatctgacgctgcaaaatactttggcttcaatcctaattatttctctaatatggttaaggctaagactggtaagagttttgtagatcacgtggatgatcgaagaatgcaagaagcacgtgaattgctggctcagcctgatatttcacttagagagattattggtcgagtaggatattcgagtaagtctttcttttataagaaatttaaccaatactaccacataacaccagcagcgatgcgggcagaattgtttagacaagcaaatatcaatttaaagtaaaaaaataatctggacgaaagttccagattattttttacatattttctaagcgtttaatgcggtctgctgttggtgggtgagtatcaaacaagtgcgtcaaaccgtgattgtggaatggattttcaatatataatccagcactactactatcagctactttcattggttggctattttcaatcttgtgtaaggcagaaattaagccttgcggattacgtgttaatttaactgaagatgcatcagctagatactcacggttacgtgataaagccatttgggccaaggatgcagaaagtggacctaagatcaaaacgaagaccaaggcaaccactttaaaaatcatggctaaagcattactgtcacggtcatcgtcgtcatcactgcgcacgccgccccagaaccaaaaattggacgccatattagagataaaagaaatgaccccaactaataccacggcaattgttgaaagtaaaatatcgtagtttttcacgtgtgataattcatgccctaagacgccttcgagttcttcacgatcaagtaattctaaaattccttgagtaactgccaccgcactatgttcagggtcccgaccagttgcaaaagcattgggactaggatcaggaataatatagacccgtggcattggaacctgtgccaccatcgccatatcttctacgatatgccacagttccggattgtcggcttcatgaatttcttgcgcgtgattcaagctcataatcatgttggctggattttgccacatgatgaataagtagactaaactaccgatcaaagcaatagtaacgcccattgttggactattgctccaaagataaccgattcccgcaccaactaagcctaagatcaccaaaaagatgaacataattaacgccgttttgcgtttattacgagcaatttgttggtaaagcatggttaaacttccttaaaattaaaacttaacttgaggcacattcttttcttcactaggagtttctaagtagttaatcttagtaaagtggtgccacttggcaacaatatttgatgggaaagtaagcaacttttgatcatatgttgctacagttgaattataaagttgacgagagtaagcgatcttgttttcagtgttagtcaattcttcttgcaattttaagaagttttgattagctttcaagtctgggtaggcttcagccaaagcaaaaattgacttcagagaatcagtaatttggttagaaagcttcatcgcttcttcatggttaacttgaggcacattaaccaattgattacgtaatttgactacttcctcaaaagttgatttttcatgcttggcatagcctttggtggtttcaaccaagttgggaattaagtcattccggcgcttaagttgaacgtcaatttgactccaagcttcttcagcatagactttcgctctttgtaaaccgttgtaagttacgatgtagatagccacgattaaaacaataatagctaaaatgatccaaattaaaggtgacatagtttttcctccataaaatatttatttaattttatcgttttcgaatttcttgagcaataaaaaagaatgtcaaagcggcattcttaacaaaaaatattaaattctgaagattaatagtaataatccgactgcagttaaaataatcaaaccagcaaactgcataatggtccattgaatgaaaaatttcttcttgcttacgctgccgtgttgattgaaagtcttaagaactaacatgttggccattgagccaatggctgaaccaaaaccaccaatgtttgaacccaagaataatgcttgagcataagtagtaaatttaccaactaaaatggttgatggtacgttactcattacctgactggagataattgaagcgaagtaagttgaaatttcggaataaacagtaccatggattagatttacgataacagggatttgttggatatcgctgatgaagatgaagaaaccagtaaaggtaagaagtaaggcgtagtcaattttaagcataatccgaggattaattgcgagggctaatgcgattgatgccaacattggccaaataatatcaatggttctgaaaacaccaaagaagaagaaaataaagacagcagtagttatcagcgtcgggcgccagctgatcttgattggctcagctttttgcaccggaatttcttctttaggaataaacagaaagactaatcccatgattagcattgaaactactagataaggtacagaccattcgaaaaattttaatgggctgacatcaaagcggctgactaagaaaatattgtgggggttgccccaaggcgtaaatgctgccccaatatttgctcccattccaatcaaggtaacaggcaaaatttgtggcaatttataacgcttagcaatatttaaatacagtgggatcaaggtaaatgcagtaatgtcattacctaaaaacatccccgaaatgacagccaacaacgaaaacagcgtgttcaacttacgcgtattatcggcaatacttgtaagcttgtacgctaaaacatccagaacatgcaagtatgcatagatctggataatcgttaacatcgcggcaacagaccataatgtatggaaattaatgtccgcaaaccgcggtttagcaaaaaaaagactgactactgtaatgatcacagtaatctgtaaaattctatctttagcaatattctttaagacggtcataaaaggtcccccttacgtattacaatcgtctaaaaaccctatgtaccattttgagcctttttgttattgcatgcaatgataaatttaaaaaaatatcaagattagcggtatttttgagcatatttttagttagttggaactagtcgtgctatacttaaataagtaagttaataaaatttagattgaaacgaggaaacaaaatgacagagaatgcaatttcaatcaatattaaaccagatgctgcagaaatgattaaaagcaagatggatgcagatcaccaaattgttatcttggctttagatgatggttcaaccaagtattctaaaaaaggcggcacttgtactattggcgacagcttccagtttgtaatccttgctgaaaaagatcctaagtataatattttaatcgaaaataatgctggtcttgacttgtatactgctcagccggaaacaactttctttgaaccaggtctagtggtaaatgcacgcaactcaactttgagtttatcttcagacagcggcattattgatggtgggatgaccgttacccaatatgaacctgaagcaattactgctgatgatctaaaaaacggcggtcaatgttaaaaaaataaaattaatcatagggacgagggaatgacctcgtccttttttagtatagaattaagaaagtgatttcaatgtaaggggggaagaacaatgacttttgtccaagaaataaaagcaggtagtcgtgaattttgccaaaattggctgcggtatctgctactttttatgggattaagtttatttaatcaatttattgttattccactttttcgctatattacaacctttgttttgcaggctagtgctattccgttcgtatcttatcaaaatgtagtgacgatcattacgacgcatacggttgcctttttaattttgataattgagttgctgcttttattagtaatcttgtatgcgcaattagcttatttacttcatggcgtttgggatattaagcatcaagtttttacgtggaaaaatagttttattcaaacttggcaaaatatcaaaaaaattcgtttgggcacgctttttattttgatgctctattttttattggtagtaccgttagccgatgtcatctttagaacaccacttttaagcaaagtgcagatttcagaatttatcttggattatctgacgagaacgccaatcttgttagccgttttgattgcgttttatttagccgctttgatccttggtgcaaggctagtatttgctttacccatcatcgtttttgaccacttaaagtcagtgcaagcagtaaaaagaagttggcgattaacggcgcactaccgttggcggacgatttgctggaggattattgttttagccgttttatctgcagcagtcatgacaattttctatttagcaatgtattgcctgcagctattagttgatttattacctgggaaatgtccgttaattttagccattatcaatctttcgcttgttcaaattattagtgaagtagcgttagtctatgttagtgtactgggcttatctattattttgaaagctttaaggcaagaaaagataagtcaaacaggtaaaactaaaaagataattctaagtacattagttgtgtttgtactagtaatgattaatgcaatatccaccaattatttatatttgactagtgtaaatgctaaagcgccagtaattatttctcatcgcggcgttgatgataaaaatggcgtacaaaacacgttacagtcattaagaaaaacggctaaagaaaagccaaactacgttgaaattgatgttcatgaaactaaggataaaaaatttatcgtaattcatgatgagaatttattgaagctaacgggagttaataaagccccgaatgatttaactttacggcaattagaaaagttaactgccaaagaagacggctatcatgctaagttagttagctttgattaatatcttgaggaagccaaaagactgcatcaaaaattgctaattgaaattaaaacgacggctaaagattcgaagaaaatgctgcagcgctttaatcaaaaatatggcaaaacgattcttaaaaatgcgtatcaagtacaatcactcgactatcgcgtggttgaaggactgcacttaattaatccacgtttggttgtcttttacattcaaccttataattttacttatccgcaaagtgttgctagtggatattcaatggaatattctaccttgaattcagactttatttggcaagcccatttgcaggatcgtcctgtttatgcctggacagttaatgacgaaaaattaatgaagaagatgatgtatcaacaagttgatggcttaattactgatcgagttgatttagctaaaaaggcaattaaaagtttccaaaaagatgctagttatgctacgcgaatcttaaattatattgttgtcctgcatctgtcgaaaaattttgaatctgcatgaagacttgatctgaagggctggacatggtaaactatactagattttcgaaaatctgaaaggaagtatagcatatgcgtaaaggtgaaaattacaacactggttgtgaaccaaaccaaagacctaagaacaagagaaacgcaaagaagcgtgttgctcacgtagcagcagttgttgctttcttgaacaaggccgcaaaagatgaaaacaagtagtctttaataatattgaaataaaagctaggagctgacgcctctagctttttttgtgcttactgaaaaaattaattctaagtgtataattttttacggtaagttgaataaataattaaaaaagcccaagtcctttgaatttggacttgagctcaaacaaaaagaccagtagtctgatgttaagaacaaaaaacacattagaagctggtcttttatgaattcaattgtaactgaaatcgcaaatattataaagtctgaagataattatattaagcgtgaaagaaaaataatctgtttcttcttaaacctgattaaggaaatcatggccttggctttagctaaagttgatgatgaaatgattaccaaggttaaagcacagcaagttcttagttaaaatcacgccacttaagcgttacccaaaagttacgttagttgtaccagctcataatgaagaattagttattagtaaaactacgcaggcaattttaaatttgaattatccggctgataagttacaaattttaatctatgctgatgatactgctaaaattgcccgggaaataatcaagcaatatcctgaacggaaaatcaatgttcaagtaattgaacgaacaggtagtggtggcaaagctggtgtattaaatgatgctttgaagattgcccaaggagaataccttggtgtatatgatgcagatgccatgccagaagaaaatgctttgtattttttaattaaaaagattttggaaaatccggtgagatataaggctgcttttggtcgcaataagacgagaaatgcgcggcagaattttttaactaagtgtatcaatcaggaaattgttgttacccagcgaattcaacactgcggtatctggcaattatttaagattggtcgtattccagggactaactttattattaatactgattatgtcagatcaattggcggctggcgcaatggcgctttgaccgaagatactgatatttcttttaaaattatgggctcaggtagtttgattgccttagcctataattctgaagccttccagcaagaaccagaacgcttaaaagattattatttccagcacttgcgttgggctaaaggtaactatgaagtggtgatcaataatttttgccatctttttgataaaagcaactggcgggttaaattagagactgtctattattcctgcacttttttctggtttaatttggcgattgttttatcagatctgatctttttttctaatttgattgccttaatcgtccatctttggaatcctgcagtagtaataccatttacaatttcgcggagtaatattttattagctcaaattctgctctttaattggctattgatggttttgctttatattttgcaaattaacctagcgatgactacgcaatatgggcaggcaactgacgaacagatttggctagccttagcatcatattttacttattcgcaattgttcatcattgtatcaattcatgcggttacttcagtaatgctagatcgcgtttttcatcgtgatagtactaaatgggttaagactaagagatttgcggattaggtgatgagatgaaaaaaagatggatgctactaggatttttactcgtaacgattgcatttaccggtattatgatctatatcagagcagataataattcagcggtgcgtaatttttttctacattcttggcataaaaattatgtagttgaagaaaagaatcttgcctatattaataccacgcctaagcaggaacaagtgacggttttatctgaaggccaaggatatgggatgtttattgcggcgcatgatccagcagttaaagaaagcaactttgctaagctagtgcagtattatttaaaacaccgggatcgtaatacgcaattgatggcttggcggcaaacaaagaaaaatggaaaatggagcagtgaacgcaatagcgctactgatggggacttatttattgctaaagctttgtttttagcggctaaaagatggaaaaacccagcatatcagcggcaagggcaaaaattaattgccgatattttgcgttatgaatataatccgacaacgcacgctttaacggtgggcaattgggccgattctaagccgaagtattataatttaatgcggacttcagatgtattgccgacaatgtttgatcaattttatcgtgaaagcaatgattcgcggtggctcttaattaaaaaaacaatgctcaagcggctcaatcagttgagtcaccagcataagagtggcctagttccagactttgcctggctgacatcaaaagatgctaagccagttaaaggaagggttaccactgatcgatatgatggtgattattatgccaatgcttgccgggtgccaatggatttagcatttagtaaggataaattagcaaagaatactgtacatcgcttgcttaaattttttagcaagcaaaatacaattacagcaggctatactttaaaaggcaagccggtcaataattatcaatcagctagctttagcgcgccaatttatattgcggtgaatgaaaatcgcaatcaaggctatgataatttgtttgcttcgcagcaatatatttttgctaaaaaattacctaaaaataattactatgatgcagcactaacgacgatggcaacgatactgacaccggcgcatagattttaagaggcaaaggcctctttttatttgcattgaaaatcaatctttgataacatagtaaaaattttaaggaaaatgaggaggacaaaaaatgggattaaatgcatacattcaaggttttaacagtttagagtcaattgatcgagcaccgggctacttcaagtatcatcaccactcagtagctgaccactgcttcagaacagcggaattagcacaaatgatgggagatattgaagaagtaaagggcaaaaagaagatcaactggaaggctttatatgaaaagagcttgaatcacgattatactgaacgtttcatcggtgatattaagacacctgttaaatacgctactcctcaacttagaaagatgattggtgacgttgaagaaacaatgaccactaagttcattaaggatgagattccagaagaatttcaagaaatttatactaaacgtctctcagaaggcaaagatgatactttagagggtaaaattttatcaatctgtgataaattagatttgttatatgaagcttatggagaaatcgaattaggtaatcctaacccggtttatatgcaaatgttcaaggaaagtcttgaaacgatcaagaagttcgacgatttagtttgcgtacaatactttattaagaaaattttgccagatctttttaaaggtgatttcgcgggaaaggataagatgcaacgaatagcttttagcattctattgttaggggatgattaggtgaaatttcaatgtagttcatgcgggctgcgcatggactctttgcattttaagcaagaggggttaatgaatcctaagttgaccagtatttgcgacatttgtatcacgcgcaacctgaatccggaagattacgcaaatgatgcggtcgcaacttttgctcaaagcttgctttacacgtttgtcggtgcaaagaaacaagatcaatcaggttttattgtgaaaaataaaaaggaccgtaaaaaatacgaggcctttttacaagattatgatggcaatgaaatcgcccgccaacagattaaaaggtctgatttgaatttggcggtaattaaaagcgaagatggcaagcttaattatgtgcctaaccaaggcgtaacttttgagcaaaatttaaagggaatgggtttggagatcaatttccagttaaacgaagttgattttattgatcgtgaacgcgttcgggccaagtataaataccgctgccaatattgcggcagacgtggccacagcgtagatcataaggatcccgtttctcttagtcacaacaacagcttagataatttaactttagcttgtgcggaatgcaaccgaattaagtcggatatgccttataagttgtttattcaactgaatgatcaaatttctgagatcaataaaaagctagttaagtatgaagatgcgctgggtactttgagagaagaatttgagcatcgtcggcgctatttagcggctcaagtacaccttaagggtgtgatcaatgatcctgagctaaatgcgattagaaagcaaaataagagcttacaggatgccattgatagtttacaaagtgattatgatgatttgcgtcaaacgcgcaagacgtattttgatacgggctggaaattagctcgcattaaggaaaataaggatattatttaaaacgtaaaaaagcgctattttttgtaaatagaagataaaaataattctgagtttgcaaaaaatagcgtttttttttgtaaactcaattcaaaatagaaaatgagttttaaaaagatcatccccatataggaatgatctttttaatttttatctatctaattcgatcttctggatcaaataaatatttgtcccatttaacttcattttgaacagtagggtggaagagcaagaatgctagcaacagttgaccaacgtaaggaattacgcccagccaccaccaaccaccgttaaagcctgcgtcgtgcagacgacgaacagtgtgacctaattgtgctaaaaaggcccaaatagctgctgcaataaagaaaataataaaaatgatgaagattacaccgattaccttggcatcgccagaatcaaattcagtaacgctgaaaggagctaaaagcatgaaagcaagtaggtaacaagcaagtacgccgattgtcatgataacttggctaattgcagtacctacccagaatgaggttctagtagatctagcatcccacttaaagcagtcaaagaagtgttccttcaagatttgaccaatagttggtacaggaacattactttttgcgccacccttaggataatcttgatcgctgaacaagtatttgccccacttaacttggcgttgaacagatggctgcaattcaagataaaataaaaacattgcgccataaccagtgaaggcagcccagtaccaatagccgctgtagccaacatcgtgcaaacgtcggatcgtttgtcctaatgcagctaaaaatagccacagataaacaacagccgcaacaataccatcgactattctaatgccggggttgatgttttggttaaaagcatagaagccaagaaggatgcataagatgccgataacaagattaatcaaagtgctccaccagaaagatttacgcgtagttcttgctttccagttgaagggatgcaaataagcctcgttcaaaatttgcgcaaaactttctgcaggcggcagtggcagactttcgtcataaggcttgataaaataatatactctatcattcattttacttcctccaaaaattaatttgttataaattatacgctaaaaaagccgtgaagcaattaaacttcgcggcttttttgatattagaattcattatttctaaagttgctcaagaacttttgcgtcttttcattcttaggatggtcgaataattcttccggtgaaccttgttcagtaatgataccgtcactgatgaacaatacacggtctgaaatgctcttggcaaagcccatttcgtgggtaacgatcaccatcgtcaaaccggttgtagcaagcttttgcataacgtctaatacttcgccaaccatttctgggtcaagggcactagttggttcgtcgaacaataaaacttctggattcattgaaattgcacgggcaatagctacacgctgttgttgaccaccagataattgttgtggtttagccttgataaatggatccataccaaccttttctaggtttttcatggcaatcttgcgtgcttcgtcttttgaacgcttcaagactaattcttgaccgaccatacagttttctaagacgtttttgttttcaaataagtcaaattgctggaaaaccataccgacctttgatctaaaggtgttacggttgtagccgggatgcaagatatttttaccgtgaaaatcgatctcgccgccagttggttcttcaagcaggttgatacaacgcaaagtagttgatttaccaccaccagaaggaccaatgatcgttacgatttcgcctttattgatgtcaaaggaaatatcctttaatacttggtgatttccataagacttttgcatgtgctttaagcttaaaattacttcgtttgattcagtcattaattatttgcctccgcatcttttggagtaccaacttggacttggttagccatcaagttgtaattcttattaccttcaagtctcttttcgataaagttgaagattctagtaatagtaaaggttaagatcaagtaaattgctgaaatcattaagtaagttgggaagaacttgaatgattgactggcaatagtagtaccaacgaagaacaattcagaaactgagatgatactcaatactgaagtatccttgatgttaacgataaattcgttggtgattgatggtaaacagtttctaatagcttgaggcaagatgatatgccacattctttggttgtgggtcataccaagtgcactagctgcttcgaattgaccttctggagttgaaataataccaccacggataacctcagctaagtaagcaccagtgttaattgaaacaataatcaaagcagctacagttctatttaaattcaagtgccagaattgggcaataccatagtagattacggctgcttgaaccatcattggtgtaccacggaagatttctacataaacagataataaccacttaactacgttcaaagtccaacgcttgccgcgagtagttggagtaggaatggtacgaataattcctacaagcaagccgataaagaaaccaacaatggtaccaactaaagctaaaagcaaggtcatgccaatacctgacataatcatgccaccatattgcttccaagtagtaactagccagttttctttcttagtttcgttaccagccttaggttgttccttgatggcttgtgacattaattgatcacgctttttattagaaatagttcttaaagtagcgttaacttcatttaaaagcttggtattaccctttttaaccccgatactagttacggaatcgtcatggtcaactttgaagccagccattttgtttaagttaactgcaataatgttagggttaacgttgtggtaactttcaaattcaatatcttcagcaacataaccatcaatggtgccagaagctaaactttgacgcatggctgagaagtcacgcatagctggttcacgcttagcaccctttaattgcttgattaaatcatagtgcaaagttccttgttgtgcagttaacttagcacccttgaaatcagtcaatttcttagcgttagaatacttgcttgccttgttagtaattacgacaaaagtactcttacggtaaggttctgagaagttgattgccttgcgtctttcagcagtaggagacataccagcaataatcaagtcgattttgcctgatgtcaaagctggcaatagaccatcccattgggttttttcgacgattacttttttgtgcagtcgtttaccgatgatcttggcaatttgaacatcataaccattagcataggagttagaaccatcaattggaacagcgccattagctttggttggctgagtccagttgtatggaggatagtttgcctccatacctatttttaacgtgccagaatctttcttagcagcttgagtctgattgctactaagagaaaaaccgataaataaactgagtaggacagacattattacagccatccatctaaatcttgacttcaattataaaacctccaaaaatagttttaacataaagccaacacaataaagagtaaacaaaaacctcgctcttccaaagaattgcgagggtcataatcatcagtgtttaaaccaaatcttatagcgctccctgggaactaaccaggacagtctatagaatattcttctatagcccaacagattaacacgcgaatattaaatctatttcggcggcaaccctaagttaactatcattgttttcgcgaactcaaacttaacttgtgattgtcgcaacctctattgcattggaaaaatatttaactaatgaagaatactagaagaaaaagttaaatttgtcaagcccaaccattattagtttcataatttctctttttcatatcagaaacataaggatttcctgctacataaaaacgtaattttttgttagcccaaacgggatcagattgattgataccaacacgcgctgcagcaattatttcctggggaatttttttatgacgatcatcaagatcaatggcgaaaggggagtctgataaaaagtgcaaattccaatttttatcatgaataccaaaagcttgcatcatttttgcgggaccattagtcaaaagaacgccatctttaccatgacggttcttgatcatggtctcaattcctaaagtgggatcgattgcacggattaaaacaccctgtggttcattctgaaccctagtggcaacatcaaagaaaaaatattgacgttgcgcgtagatatagatcgttccgcctttgccgtaaagtccttcattcgctgggctacgacgaccgccataagaatgtgcagcgcgatcctttttacccatatatgcttctgcttccacgatatagccgcctaatttttcttgaccattatcaaaagtaagcattcgcccaattaggtcttttgcaatataatcggtagtgttagtagaaaaataagttgaataattcatttttgacctttctagaaaagagataaaaaataatgacagaaattaaattagttcgaatttatgaccatgagcaacctgctggttatcggattttagttgaccgtttatggccacggggaatgagcaaagttaaggccgatttagctgaatgggataaacaaattggccctagtaaggaattgcgtcagtggtttaatcatgaagatgaaaaattccctaagtttaagcaaaagtatattgaagaacttaatcataatgattatacagcggaatttttgcaagatgtaaagaagcatttggctaaagaagatgttcttttcttatttggtgccaaaaataaagagcacaaccaagcagttgtactcaaagaatatgtattaaatacgctaaacagttaaatatgtttgtgaccgtgttttttaactttccaaaagtggaagagaattgtcaaaattaagatcgcaaagacaataattgcaaaaacggtgtttggcaactcaaatctcaatggtggcagagctagtagcaattttaaagcgatgattcctatcaataagtaagccattggctgcaattctggaataatatccattaatttaatgataatttcggcaactcctctcatacagagaatgccgatcatgccaccgattaaaacaacaacggggttatcagacacggctaaagcagctaaaacagaatcaattgaaaagacgatatccattgattcaattgaaataaccgtacgccagaaaagagatagcacatgtctctttttctttttgcctttgtggcgagctgcttcgcgctcttctttttctttctcatgttcggcagcttgtttagggtggcgttgatcatagaagaatttaaaggctaggtaaaaaagataaatactaccagctaatttaatctcccaaaagttgatcagataagtcccgattccgataacaataaagcggaataaataagcaccccacaagccataaaccaaggacttgcgttgttcagctttattaggtagcacctgtgtctgtgcggccaaaacgacagcattgtcgactgataacaagcattccatcaagattaaagtcagaatgatcatccagtctttgccactggttaggacatgtaaccagttattgccgtcaaaaaagggtgcatatagtttaagaattgacatgtagttgcttcttttctaatttaattaatctgattttttctttttgtcccagacgataagtcccaactttattgttggataaaataactctttggtcaggaataaaaatcaaaacagggtttaatgctacggcgtgtgcaactgagcgagaagatgtggcttcggctagtgaattggcgacgtcaccataagttaacgtcacaccataaggaatatgctggacaacggctaatacctttcgttgaaattcagtgccgaattccgaaatatcaataggaacatcaaaattctttctgataccagcaaaatattcctttaattgtttgatatgaggtgccatctttttagggtcccgcaccaacatgcggtgagggtagaagctaaaaataggtgaaacagtttcatctcctttaagtccgacgtaagttaggccggcttctgaagctgttaaaaagtaggtccatggctcaattgtaacgtaatcatagtaaaaaaactctgtcatgtgtaacatctttattaaaaataattagtccccggatttaaaattgaagtgcaacactaagtgttaaacaaaaaggccatgaagacctaaacttgaagtgacgaaaaatcaagaaaggaagatcttcatgaccaattcaaattctagcatttctaagcactatcatcaattaaccagcgtacaacgtggacaaattcaagcaatgctggattccggcataacttcccgtactgttatcgctcaagaagttggctgccataagtcgacaatcagtcgcgaaatcaaacgcggaagcgtcctgcaaagagacagcagctatttattgtatgagcactattacgctgatactgcacagatttattatgagaagcgtcgcaaaaactgctatcagcgcaatccattgaagcattatgctgtctttttgagaatgctctccagacgctttaaagctaaatttgatgccaccagcatcgatgagttcgttggtgaattcaaaaggactatgccaggctacccttgtcccagcacaccaaccgtctatcgctatattgatcagggcttgctggacataagcaatattgatctgcctatgaagctcaaaagacgcaggaacaagcgtcatcacagccatggcggtcacgctttgcacaagaagcatcttggcaattccattgaacagcgtcctaaggaggttgaagacagaaaagctccgctgcactgggaaggagatctggttaaaggcgtcagacgcaagaatcagcctgctttaatgactttgactgaaagaaccacacgctttgaagtagttatcaagattcctgactatcgggcaagcacatgccaaaggctgcttcaaaaggagattgacagacatcctgcctggtttaaatcaatcacgtttgacaatggctctgagtttgcggatatgaccaagatcaagggctgccagatttactttgctcacccatattctccatgggaaaggggcaccaatgagaactgcaatggtcttttgcgtcaattcttccctaagggcaagagcatgaaagacaagtcaaaagcttatgttcaacaggcaactgatgccattaaccacaaatatcgccgaatcctccaatatcacacagcagaggaactcttcaagcaatatatctcttcataacctaactgttgcacttaatttgacaattcaggaaaaataattagtctaagaataacaaactaggaaagttaattcaaattctggaatgctgttaatgcatccccaattatttgcgtgacaccaggggtaggaatttctgtcttgttgatagagtaaattttggcgtcttctttgcgataagccaagagctgggcaaaaggataaactacaaaactcgtcccacaaatgatgatcaagtctgatttttgcattatttcaacggactggtttaatactttcggatcaatgccttcgccgtataacacaataccggggcgaataattccgccacaatctttgtgtaaatagcttttagcatattcttcataagaaacaggttgatgacatttagtacaataaatattatataaattgccatgaaattctgttacatgttgattgccagccttagtatccaaagtatcgatattttgggtaattaaattacctttttcattacaaaaatgggcgattttttcatggattaagtttggtttagcagtaggaaagtacatattgttcatgacaaattcatggaaaaattcaggtcgattgaatagcgtactatcgctcagtatagtttcgggactttcttgcacgccatcatagattccgtttttagagcggtagtcagggatacctgagtgggtagaaacaccagctccagttaagaatacaatatgttgggcattattaatatctgtttgtaattctgctaaatccatcatataatgtcaccctccgtgaaagtcactactttaattataaatcattgttttgttataatgactgaaaattgaaagcaccaaaatcaagctcaagtcctgtcactattgagctttcttagacgtaattagtttttatatgatctgtttcagtgcaatttgtatgaatcgtggcagttggttaataaagtcattgattacttcatctatcttttcaaaactattctgtttaagctcttttaattctgaaattaagtagaccaatgcatctacgaatctaatatcaggtaaggattcgttcattagatagaataaatctccgattgtcttatcatctgtattttgtctttcctgccaggtcaatagatcataagttattgctgtaactgcgatatagccacattggccatcatagctttgaacttgagatttatctaaagcaagatattgcttagacgtcttaaaatatgtttcaatttgccatctacgaccataaagttggatgatttcttcagggctaagctttgtctgagtagtagctaaaaccaaatacttgttcttgtttccacggttggagacaaagacgagctttaataaaaagctatgtccatgatattgagcctcaactatgcttgaataaagataatgtttctttttacggatgtttgaagcagcaaaacgatcatacaagtctttaacgctatagcggcgatggcgataaatgtaataaatctttgaactcttcttgatcatgccaagtccatctaaaccgatcttctttaaaatccaaaacattcttggagaagaaaaccaagaatcgaataagacgtatttagcttctactcctaatcgtaaggcttgtctaatcaactctacagttacatcattcatctttctctgagcttgatttctccttttaccagaaattgaacgttcatcagcagtaatgggagcagctccaatcatatttttcttggttttggttgacatcaaggcaaagttaaccggcaagaaggtattgccatcgctccagcctaaagttaaaccacgatatccgttccaatactcatgcttgtcatggtcatagactttagctagcaattcggtctttttagaaaaagaccgagccatcagcgtatcgtcaacgataaaagcaagtcggcgtcttttatcgataaatggttttaagcagccaatgagccgggctgcaatcaagcataatagtttttgccagttgattcttccatcgttaagtacattgcgagcagttctaacggaaaaacgtttgtcatccttagctctgaataaagaaagccgagcaaaatgtactgacatcagccaagagataatcatggttaatgaaacggtggatttacgcttaaaattgacttgtttagttaacttagctagaccaattagattaataaatgaagaaattaaggatttagtatcattttctgtgtcgatttgttctatactgttcattgcgcaggatctcctttactttttaggtcgacacttaaagtataacgcagagagagcctgcgtttttatttttgataagaaaaagccaagaggcgcggggaaggagcgttaatcttagctttcaagtttcagtataatgattaaaataactaaattgaggggatttttatgaaatatatgacgtatttttatgtagcaattgatattttattagtagtttatgcttgttatagttggtattggcaagctaaagttgattttcgtggtcgctatcgtatctcctcagttgtttgggcgctaatttttatctggctgggctttacatggaattacattgaaaaaggtgatccaggcctgagcgtcttcttggctctttttatcttaattagtattgtcgatggtttttcaggatttagtaaaaagcggatggtcgtttcaggctacttcaagcgtacagttaagtatgatgatttagccagcgctactttaatccagatccccaaccaagagaagccattagtgatggcgatttttcgaactagcgatggtaaggcttatatgatgcgctttaataatgaagttaatagcgtaattaagcaattacaagaatatgctggtcgagaaattcctgtcgaagttcaatcaatgatgtaattacaaaattggagaaagcattcgcgagaatgcctgcaaagtccgcaatgcgcgactttgcttttttatttcttccttagttagtaaatgcgagtgtttcatatcttcttcaaaagctgccaccattttctggttgaactttttatcataaaaaacggcattatcttcaaagtttaagttgtaagaacggaaatcttgattcattgaaccaactgaagaaaaatggtcgtcgacaatcgtcgttttggcatgtaaaaagccatcttcgtagatataaattttgacacccaagcgagttaattcgttggcataccactgtgtggcgcgataaataaaggggtggtctggcttacatgggatcataattcgtacgtcaacacccgatgaggcaattgtttgccacgtagcaaaaacggcatcatcagggattaagtatggtgtttgaatccataaccgtttgcgtgccaaaagcattagccgcatcataccgttacgcatatatggtgcataacgatcaggcccatctgaaatgatttgcgttgcaacgtcgccttcgtggatgtttttttcatcaagatcaggaaatagagtggaattgaaacggatgagctgttgattattagtgatagaggcgttccagtccatgacgaaacgctcttgcaaaagcagagaggcagaaccaacaattcttacctgactatcacgccaatgaccaaacttcttttttttgcctaaatattgatcaccaatattaaaaccgccagtccaagaaattcgcccgtcgatgacaacaatcttgcggtgcaagtggtagttaatgcggtaacgggtgatcatgttgcgtgaagtgataaaaggcaaaacttccccgccagctgcccgcaattgatcgaaccatgctttagtagctcccattgaaccccaggcatcataaattacgcgtactttaactccttgttttgcttttttaatcaatagttgcaaaacacgattgccgatattgtcgctataaaaagtgtagaactcaacattgattgtttccttagctcgtaccatgtccttaagcatgtcatgaaagaaggtttcaccttcggtatagagcttgacctgattatttttagttaggggagcttcttgttggtggttaaaaaagttaattgctatattaccagcctttgaagtgtcagaaggactagtatttttaggtgctttagcaatcgatttttgaacatttctcaagccaatgtgtttttgcttattgatggcaaaaatattttcctgggaaataccccgaccaaagaaggcataaagagtgatcccgactactggtaatactaacaggatgattaaccaagcccaagtggttgaaacggatcttctacggtggaagacaacgtagaaggctaagattgtgttggtaatgataatgattctaacaaagtcatgccaccagatcataaactcctccaaaattaaactacttttttaatttaagaaacttgtcaataatatcgattacaaacggattgtcatgcatccaactatgttcggcgtcatctttaccgcgtacttctacttcttgataaaaatgtgcttttggggcaacgatatagcgaatgctttttgcggaaacaacagagatgaatttatcagtatttgtgttatctaaaacgttgccataaatattcaagactgagatatcaggattgaatttgcgccgattaaaaaacaaataaaggtagtgcgggttcatgacactaggccgaccactttcggtcaaatagttgacgtttgggatatcgcccaagtaagtgaccccgtcaaaaggaccagcgataaaggcacatttttttaaatgtgggaacgttttgctgcggtagtgcttcatttccgtgcgaataatacatggacaagctaatgaatgagcgactgcaatatagtttttaaaaccatatcttttagctaaaaagggcaggacgaagttgagataatagtcgatgccatagataccgactattcgctggcgaaaagcaacctgcacgataggatgcttgtcactagtccaagttccttctaatttgaaatttcctaataaatcaacggttacctttaaaaacttgggattgcccttgtcataagtagcgtgtttcaccatcacgcgagtggtataatcaccgccgcgaaagccatggaaataaataatgggtacttgttttagatcgcttttttcaatgtttgccttattttcaatatggcgcttgtgtaatttgaggaaaattcgcgtgggagcgaaggtggccatcagccccaaagaaatcatgttaaacatgctaggttcttcttggaggtcatgtttatgatctttttcaacttcttcagcatatttttttgtgttgaaaaacatttttaccaccttctctttcttttttcctataataaaagttatgcaataagtatattttaccattgggtaaagattttggaattttagaggtagaaatgaagttttatgcagtcaaaaaaggacgtactccgggaatatatcggacttgggatgcagccaaagaacaagttgatggcttctctggtgcagaatataagtcatttgaacaaattaccgatgctacagattacttagattggaatgcccaaactcagagcgatgtcctgcaaaaaggtgaagataatttacaaaacgccgtaaaaagggtgcaacaaaagagtcaagaaataaaaaaagcaccgcgaaaaaaggcgaagcagtataaccatgttaatagcaatcctgctgacttctttgcggtgacttatactgatggtggcacgcgcaatactggtgtttataagggcggtcacgttaaaaagaccgataaagcagcctgggcttatttaattgaatgggatgaccagaaagttcatggctccggtggtgaatatggtgctactaacaataagatggagcagacagcattgattaatgcactaaaaaagctgcttgagcttggttttaacgataaacatctattatttgttcttgattcgcagtatgtgttgaatgcgattaataagcattggctacaaggctggaaaaaacgtggttggagacgttcttctggaccattggctaatgtggcggaatggcaggaattagatcggttattaaaggaatttcctgatagtacgtttgaatggacgaaaggtcacgctaataatcgcggtaatgaatttgtcgatcatgaattgaaccgttatatggatcaaaaaatgtaagaaaaaaggctacactgtagccttttttaatttaaaataacgccgccgaacaaaccactaaagaacttaacgatttgatcccacaaattttgtaaccagttgcggttttcttgggtattaaatttattgaagatatttttagctccattttgaatctgactggataatttcgaagcctgttgcttgaagttaccgtccttcaatgcccctgaatcacgaatttcaattagaagattgacaatttgatttttttgattgttgttgatggtgtcacctaagtggttaatattaatttgattgttgacaatgtcgcgaatttgactgtcggtaatgttttgcccttgtttagccatctcattcttggcaccggcaaccgcattgttcaattgagcatctgaataaccttttttgtttttattatcttgggtaatcccagacaaggtattcatttcatcttgagcggcattaacttgcttttgatttaatgcattgccatttttagcataggcagcataaactccagctaatgcccctgaaccatcaattggaatagcgctagtaacataaatgttggcatcgctgatgccggcggtcagggctgcgtttttgtactggttggcagtaatagtcgtgatattatttttaccatcgtagtctaaaattttaacgttgattccgctgcctgagctggtcttttggatcatcgcactggaccaaacaccggatgaagtggtgaaattatcaccagagggatttaaatatttaaccagatctgagccggtaacagtaattgtttgataattaccaccgtttagtggggcggttaaggtctttaatgtgccttgcttttgcgcatcagttaatgatgtacctaaggtaactacaggtgtatcatcatctgctaatactggcttagtaaatgagatcatcgcgaccacgcttaataacattgctgtgagtagtgtgataaatttcttcattttttcttcttttcttcctttttgatcgaatatttattcttgtaatacggaacattatactaaatatttttcaaaagtgaattaaacaacacgtaaaactttcttaatttcgaccttattattgaagatggtataataaagagcaacaaagggggacaatatgttacaagtgcctaagttaaccatcatcatgcctgtttataacacggcgcaatacttgccacgtgcttttgatgctctgcttaatcaagttgacaagagcttcaaattgcttgtagtagatgatggctcaacagataattcggttaaggtagccgaaagctatgccaatcgttttccatattttaaaataattaaaaagaaaaatggcggcccatccgatgcacgtaatgttgggatgcagtatcttgacacaccatatgtcacctttcatgatggtgatgattgggtggatccaggctacacatccttttttattcatgcttttgaaagtcatccagatgtcagcttagtatcatgtggctattggatggattatcctgacaaaaagcaacgcgttgttggtcgaccagaaggtggctatttaacgcgcggtgaaacttatttgaagttgactaatgtctttagctcaccaatgaaaggatatagctggaacaaggcctataaaactgccattattaagaaatatcatttgaagtttgatagggatatttcactactggaagatcagatttttaacgttaaatatatttctgtggctaaaggcgtctactacacgcaaaaaccttattaccactactggcagagaaagggcagtattattcaccagcctaatattaaaaaagttgcggataatttccggggaaattaccgggtttggagcaaaattatcagtacaatgatgaaagaccgcgaggaagaaaagatgcgtaagaagttagagcgacagcaggccttgcgtgatagtgaataggggaaaacatgaaagaaaaagttaatggagtcgaaatttattatcataagttaggtaaaggtgagcctttgcttttactacatggacatcacttagatggtggtatgtttgataaaattgtggctccgctttctctttattacaccgtttacgtgcttgatatgcggggccacggccttagtgaaggcgacattgcggaacactacaagaccgaagtagaagacgtctatgcctttgttaaacaggttggcattgaaggctgctattgcttcggttttgatgcaggtggtctggtggcaatgatgctagctagaaaacatccaacgatctttaagaagatgattgtagctggcgttttcgttaatggtgcaggcattagaccatatcactacttaacggaaggctttcatcgctttttgagacttgatcgtgacagccgcgtagagttgactgagtcctttatttcagtagatgacttgaagaagattactacgccaactctttgtgtagtaggtgaaaaagactgggttaaggttgagcatgtacgttggtatagccaatttatgcccaatgcgcggttggtgattatgccacggcagacgcatgacagttatgcagtgcgcagtttaaaactgctggatttgattaaaggattttgtaggtaatacgcgtggtgctagttaaatcgttctaggcaatatgccatattataagctaaaatggctatttctagccgctgctgaaagccagctaagctccttgctcggttattttcagcgttatagtaactgagcaaagaaaagtcgctttcaattgttcttctaattgccatcagttgatgattattatgttttttagcacctttcatgttttttcgatatggtgtccaaaggacatagcccataccttttaactcggcagctaagtcttttcctaagtagccttcatcgcctaaaagataatggttaattggatgagcattaatcatcaattctgtcgtttctttggcatcatgcactgatgctttagtgactgcgtagtcaagcaaatagccatcatcgcttactagcgcgtgcaccttgaaaccataataatagactttcttggttgctttatagccaatatcggctatgtcacggaagatcttaacacgataattacgaacaggctgacaaactggaacaggaaaactgtcaataattaaaaattctccagcaacctttacctcttgattccaagcttgacggatgcagcgaattaaaggcaaaagcatcttggctcgacgattaaagcgagaatgagataagccaacaaaaaatttacagaatcttctttgggattcaattccaatttcagtttgccaaatgagcatcgctaagatggagctgtcggaaagctttgtttgatcaatgttttttcgatgcgtaagcttatcaggcgcataaagattatatagtgaacgacaaattacatttaaacgactaaaactaacttgtaaatggtgagagaaacgattaagcttgaggtagttcaattagatcagactcttttctatttaatttacttacaacttgagtctaatccgattggacttttttattaactaaaacgatttaactagcaccacgcgtaggtaatgtggatagtattgctggttaacgtgatagttgctgcagttgctgttatatttggttttcaaaatagggtagaaacattaaatctgttcaatgccggtatagtttttatcacttttgggattgttttacttttaggtgcaattcctgtttatcaagatttcagcacgtcatcaattttaatgttcattgcaggcattttaattattgttagaattattatgctagctgttagtttaattaccaaagtgccaagaacagtaaatctacaggatattgcaatttcattgatgatcgctgcagtttgtttgatatatttcatgcacggtttaaatctgagcttaagtaatttagtcgtgccagaattagcattgattattggcattattttgttttattttaaaagaaagcgtcaataaaattgattgcaaacatggacatctcttcaatagaggtgcctttttgtatataatggtggtgtatacgatttttattcagaagaggtaaataatgaacaaggaagaacttcatcaattattgcacccaatgaaagttattggcttaggtggtaaccctgcattaaatgaaaaaattgcggcaattttacaccaaccattgatcgaaactgcggttcaccactttagcgatggtgaaatccaagttaacattggtgaatctgtcagaggttgtgatgttttcgtaattcaatctatccaagatccagttaacgaaaactttatggaacttgaaattgttttggacgcacttcaacgtgcatcagctcatataattaacgtggttgtaccatacttggcatattcacgttcagataccaagactcgttcacgtgaaccaattaccgctaagttagtggctaacttgcttcaattgactggcatggatcgtttaattactgttgatctacatgcctcacaaattcaaggtttctacaatatccctgttgatcacttacatgccattccacttcttggtcaatacttcttagataacggaattgctaccaaggaagatgatgatatcgttgtagtctcacctgatcactcaggcgctaagcttgctcgtaactttggtcaatacttcaatgcaccgattgcaattgttgatcaaagaggtgctcgctatgatactgaggtccacgacatgattggtgatgttaaggacaaaaagtgtatcatcattgatgatttgattgatacaggttcacgtatttcttcatcaactaagtcagttttggcagctggtgctaagaaagtttacgttgccgcaacccacgcacttctttctaagaatgctactggagtacttaatgaattaccaattgagcaaatcgtagttactgataccattaagcacaagcgctacccagacagaatggtcagaatttccgtagaccaattgcttgctcgtggtatcgattatgtatacaatgatcgttcaatccaccaaatctttgacgaacaaaaccgtttaaagtaaaattcttattgataatttgaataaaaaatgatcctcactatgaggattattttttattcaaaaaatcgggtagataagttataaaactatgtctaaatagtaatgattgatataattgatatgtgttgtatagaaagaaaaagagaaagttagaggaatagactatggcacgacggaaaaacatgaagagacggagagttattctaggtaatactttccatctgatcagagaaaatggaatggataatgtttctttgcaaatgattgcagaaaaatcaggcatttcaaaatccttactgcagtcatactatcctcataaggctaagttaactaacgacattatccgcaatctttttaatactttaggtcaacaagttaataattatgacatggctaatagcaatcttccttatgctagaactaaggcatttatttatacgattgctatcttggggatgcacgatgagggcttggaccgtattatttctgaagcttttgttagcaatgctaccctagataattggggaatcatgcttaatgaatggattaaggaaaatcatttatttgatgacattaacgttgacgaaagcaaacttgagacaggaattgcgtttgtaactagtggtattggccgtctatatcatgatcgcaaaaaacaccatttaacggccgaagctcttgctaactatgcaacaagtgcattgatgttcagtttcttgcattgttcttctgaagaaattgatcaagccttaaaagaaggacatgaaattattgaaactgctgatatggaagttgttcaccgagcaattgatacaatgttcgatgaaggcaaggaaattttcagctaaaggggagtcgccatggttgaaggcaaaagagctgatttgcgacgaatgggttatgagcaaaataaccaatataaacgtttgttggctttcgtcatctttttgattgctgcattatcattgattacagctacttttttaaatccaatctttatgaaaaaacagattaggactagctataatagggcagtagttgttcgccaagtgaataaaaattatgatagcctagctgatttgattaatgcagatagtgaagataattcaaacttactatcggatacgcaaactcaaccaattgccgaccatattattgattattctttgggtattcattggtttaaggttactagtttgccactggctaatcagattttaagcgatatcgatcaaggaattgctaaaggctcgtcaagtggggcacaggaagttaaccgtaaactgaaaaagcagggaactaatgcaccttacgcgattattaaagccttcaatttaagtgtgatcactttaggagcaaatattgctggtttattgtttatcgttaatttgataataattattgttaccattattacaatggtttcgctactcaacgatatgaagtcgcgggctacaattcgaatggtgattcatgatacgatggctgctggcatgtgggcaggtttttggctaattttgatttcaggcttgttagcacttgtgccagtaatctttaatgtcgataatatcgaatttggctttttgcttgagattggcagtagcgtctttttggaatatgtaattgctggggtaattatttacatcatttgtgcgataccatggcaaattacagctgctaaataagaatgagaaaacgtaatctgtagaatgattacgttttttgtttgcacaaagaatcatctttctttataattaaaaaataattaacaaatttcatatgtttatattttaaaagaattgggcgagtttatgaaaaaagctaaaattataaagacttttcttgctttcattactatgctttcgactctttttttgtttaatcagcctgttaatgcagccaataaggaggttgagactggctcagtgatgaaaaaaattaagcagtcgaaagaattagtagtgggcacctcagcggattatccgccactggagtttactaccagtgaaaatggcaataccaaatatgtgggggttgatatcgagttggcaaaagatattgccaaggatttacatgcaaagctagttattaaaaacatgagctttgattcacttttggtagcgctagagacaggcaaggtagacatggttatttcggctatgacacctaatcccgagagaaagaagagcgttgatttttctaagatttattacaagccaagtggcgaatatttcttaattaacaaacgcgatcaggccaaatacaaaaaaattaaagattttgctggtaaaactgtcggtgcgcaaactggtagtattcagtattctttgattcaaaagcaaatgaaacagtctaaggttaaaggcttaggcaaaatcaacaacttagttctggcattaaaatctaataagatctctggcattgtcatggaagaaatgactgctaaggcctaccaacaaaacgacaatagcttgatggctgtgagaagtgacttgcgtgaacaacaagctggtaacgcagtagcaattgctaaaggacaaaatgacttagtagctgctgtgaacaagactattaatcgcgttgaacaaaaagatttgattaataagaaatacttgcctgaagcagctaagtatatgaagacagcgcagaagacgaacacgatgactaaatatattccttactttattaagggagttggctataccatcgtgatcacgattttctcagtgttaatcgggatcatcttagggatgctcttagccttaatgcgtttgtccaagaataaattgctgcactggattgcagtttgctatatcgaattcattcgtggtacgccacaaatggtgcaaattttatttgtttactttggtgttggagcattaatttctaacctgtcagctgttgtagcggggattatcgcaattgggttgaactctggtgcttacgttgcagaagacattcgttctggtattgcttcagtagctaaaggacagactgaggcggctagatcattaggtctttctcaagctaaggcttaccgctatgtaattattcctcaagctttgaaaaatatttggccggcactaggaaacgaatttattaccctgctgaaggacagttcattggtttcagttattggggtaactgaattaatgtaccaaacggaattgattcagacttcgacttaccgtggtgttttacctttattcattgccatgattatttactttatcatgacatttactttaactagattgcttaattatttcgaaagacggatgaaacacaatgactaaaatgatcgatatccaacatttgaagaaaactttcggcaaaaatgaggttctgaaagatatttctgcggaagtagataagggccaggttatctgtattatcgggccatctgggtcaggtaagagtactttcttgcgttgcctgaatgtattagagcgtcctacgactggtaaaattgtttttgatggaacagacttggctagtctaaaggatggtaaggaacttgatcaattgcgggaaaagatgggaatggtttttcagaactttaacctttttcctaatatgaatgtaattgaaaatattaagttggcaccgatgaaagtcaagggtgttagtgaagctcaagctgagaagactggactagtcttacttgaaaaggtgggcttggccgatcgtgcaaaacaatttccagctagtttatcaggtggtcaacagcagcgggtggcgatcgctagagccctagcaatggatccggaagtaatgctatttgatgagcctacaagtgctcttgatcctgaaatggttggcgaagttttgaaaacaatgcaagatttagctaattcgggaatgacaatggtgattgtaactcacgaaatgggatttgctagagaagtagccgatgaggtctggtttatggctgatggctatttacaagaaaaaggcacgccacaggaagtgtttgaacaccctactagtgaacgtgcaaaagatttcttatctaaagttttataatcaaaaaggctcaagcattgcttgggccttttaatttactcatctgtaatgatggggtttgataatacgtactgtcttacgaaaaaattttgatgccatcctttttgaattaatgcattaaaaaaggtgttttgattattaggcaaagcagtggctttgggaatgatgacagcacgtaaaatcttgttttgaagtaaaattggtgattgcacatctgtttcgctatttaaattagtggttgcttgattggtcggcgtgttggttgtatcctgctgaacttgataatttgtagtgtcattagtactatcttgcttaaatagcttgaatctgtacttctgcacgcctttaacgtcaacttcatattcatgtcctgcaactaggttagtatttgcgggtgaataagttaggatcgttctaaaattgccgtagccacaggagctgtaattcttaacatgagctgcagtagtaacaactttagtatctaaatcagtgatagtaattgttggcttatttttaatggttctatctgataaatagagcgaccacatgatatttttcccttgaagcaattcaatagggaaaagacgcatgctaggataagcaactaccggctgactagcaggacgaaaagtatcattaatgtttagtactttttgaacggaatagcggtagccatttgtaccataagctgccccaatgcctgtagtggttaaacgacttgaaagtagccaagctcggtgaccggtatctgaaccagttaaattataatggtcagtaattaagtcagtgatcacatccccagcggtttgctgtgaaacattaaagtttaaatttgaagtttcagaagtgtctttagctagcttccaaacaaatttggagatattgcttggcttagtttcactaggtaaaccatgttggttaatgaatgggttagcattaattgcggccattacagcagccgtaatctgcgcgtttttattaagtgtatcagtagtcgagatagcgggcagactgaacaatgatcgatagtaattgatataatctgtttgcgttttaatgtattttggatctaagcgacctaccttaaattttttgcttagatttggctttttagcataaatatttgcggcactataactagttttatcaaggttcgcatattccttttgaaaattatgaacttcgttaacttcttgtgttgtgaatgtcgctgcttgtgtaacttgtccggcgagggggataaataaagttgcggcagcggcaatagaaaatttccgtagaagcattttagactcccttctatggttgtcagtatacctttcattataaactataaccaatgaaaaggctttagtgaaaaatattccactattttgcgcttttctggtattctttgcgtataattaaagattggaacatttaaaagaggtataaaataatgactaaaaaattacaagttggtttgatttttggtggtaattcatcagaatatgaagtatcaattgtttcaggccgcaacatctataaagcaatcgacaaagataagtttgatgtgcacccaatttggatcactaatgaaggctactttgctaatgaagaagaaagcttcaaggttttagatgatccttcataccaagttaagaacccacataaggttaacaacatttctaacttaattgaattagaaaacttgccagaaattgatgttttcttcccaattgttcacggtaacttaggcgaagacggtgttttacaaggtttgttccgcttgatggataagccattcgtcggtgatgacgtcttaggagccgctgtaacaatggataaggaattcactaagatcttggctcaaagagttggtgttccagtcgctgattggatttcaattaagcgttttgaatacgacgacaagaagaatgctaaacttaactatgaaaaggtagcagaaaaattgggccgcgacatgttcgttaagccatctaaccaaggctcatcagttggggttagtcacgtaactaatgctgacgaatatactgcagccttaaaagaagccttcaagtatgacgataaggtcttagttgaagaaactgttcctggcaccgaggttgaaacagctgtcttaggtaacgacaagccaattgtagcaggtgttggtcaaatcaccaatgcaaaaggttcattctacacttatgaaaataagtatgatgataattcaacttctaagttacaaatcccagcagatttaccacaagaaattatcgatactgttagagaaaatgcacgtaaagtttatgcagcaactgaatgtagcggcatggctagaattgactccatgctcaccccaggtggcaaggtagtcttgactgaagttaacgctttaccaggctttactaatatcagtatgtatcctaagttgtttgaagaagcaggtgttccttacagcgaattgattacacgcttaatcgaagcaggtatggaccgttttgatcataagaaaactttgcttcacaagcatgactaaacgccaaaaatatagaggtagatttcaatgacgactaacaagcatgattttgaagaattggctgcaccaaaagcagctgcacaagaattaggaattagtgttgccacgttaagaaagtattctttaatcgtggagaaggtgaccggcaagagcgactattttgctcggactaagcaaaaggctcgtctgtatcatcaaaaagatattgatgacttaaaggcttttcaccgtttatctaaaaatagtggcttaactttgcaagaagccgctcttcaaatctatgctgttagtgaaaagaaacctgaacctgaaactaaagaaccagctcctaagcccgcttataacagtaccgatgtaatggatactgagcaggtggttaagttgcttaacactttgcaaaagacaatttctaatcaaaatgaggcaattaattctttgcagaagcaattgaatgtcattcaaaagcaaaatcaagatttaattgaagcacaaaagcaattagctgcgccacaagatgatttagataagtttgcggctttgccagatatttctggaattgtgagtgcggatgaacctaaaccgaagagtgaagaagaaaagcgcgctgaagttaaaaaagacatgaataagagtcaagaacaaatgcatgacgagattatgtctaaggcaaaggaaaatgccaagaagcgggctacttcaaatgttcaccgtacactagaagatatgcaattaacggaccaaaaggaacactggtggcaaaaaatctttaagttttaaacaaattgattaagaatcaagagctgacctaacaaaaggccagcttttgttttacagtaggcgtataacaattaataggaagtagaagtaatgaaatttaaatggaaaaagcgctatacgatagcagttatcgtggcaattgtaggagcattattgacggtcttgtcctattttgccactgatatttaccacaaggacgacgttgccgtgattaccgatagcaagatcaaggatactttgattgaaaaaagtgaagatgtgtataaaaatgcggatgaaactcgccagcaaattttgcacttaaaagttttatcgggtaagcacaagggcgaaacttacacgactaaaaacgtgtattatccttcgcaattgacgacgcaaaagtatcgtgcaggtcagagaatttttgtcaatatcaagaagggtgatccagcgatcgttaatcctaagcgtgattgggtgttagttttggtagtgacaatcactttagcattgatggtggctgcagtagggaagcactcactctcgctggttgtgtcaatggtaatttcgtggctgatcttttatttgattatcatttgggatgtgcatttgaatggcgcccacattattttgctgtttggcttagctgatatcgtcttttcattctttagcttgctcattgtgcagggcttgaataaaaaaatgttggcgacttggttggcaacgctgctaggagtatttgtttcttttgccttgtgctacgtgatcatgaagttaacgggtgaatcggaaatgaaatatgagaccggtgactatgcaacgcaagatccacgaggcttgtttttagctcagactttgattggaattttaggtgcagtaatggatgaggcgaccgatattatttctagtttgtatgaattaattcaaactaaaaagaatattacgatgagacagttgattcatagtggtcgaacgatggggcaagaaattatgggaccgttgattaatgtcttggtcttaatttttattgctggtgcgctgccagaaactattttgtacttgcgtgataataatactttagcttcaacttttggctttactctgtcgctgggggcaacgcaaagtgtgatttcggcaatcggaattgttctgacggttatttttgcgacaggatgcagtttgttcttcttgaaaaaacgcgattggaagagtttgtttaaaaaagaaggtgagaataaatgagtacattatttgcattgatcgttgtcttagcgattttaatgacaatcgtcggtggtgaaactggaattcgtagtttttttagtgtgctaattaatacgattctattgatcttagtggcgatgctaatatcatggggaattaacattgcaattttgacgctgatttttattcctttaaagctagttacgattatctttttaggcactcatgactatacggtagcaaagaattcattttattcttccttcttagtgtgtttgattattagcctctttattttgggttgtcaatacctggctcaagctgcaggactaggaccagaggcaggagagttattggttggcttgtcgcagatgccgggcttgagttatccgatgattgccgtgacagtggcgattttctcaactttgggtgcaatcgcggaagccgcggtagcaatgagttcgggcttgctagaaatcaagaagcataaccctgctatcggtgaagaagagttgatggcttctggtacggttattggtaatgatgttttgggtacagcaatgaacacgattttatttgggatgttcggtagttttttatcattattcttatggtatttccgcttgcattacacgattggtgaagttttaaatgaaaaactttttgtaaatgaagcgttaattatcatgtattctttgattggggttatattaacagtgccactatcatcatttatgctatcaagaggaatgagcaagaaaggaccaaaacatgagagtagaaaatctgacgctgactaactttaataatcgtgaatatcaagttcatacatatgcgctagagcctaatcctgaattggttgagcaaaagcgcccgctagctattgtagtaccaggtggtagctttaatcacttatccaaaagagaaggcgaacccgtagccttagcatttaacaatcaaggcttcaacagtgtggtgatggaatataacttagtgcaagatccagacaaaatttaccctgatgcggggttagatgttctaagtactgtgaaatatttcagagaccacgctgatgagtatcagttagataaagataagattttaacagttggcttttctgctggcggtcatgtggtcagtgtagctaataacatggctttaaataaaaattatcagacaaagtatgattttgataagactgatgttttacctaataagacaatcttaggctatccgctgattgatattaaaaagattggttttccgattccagaagatcaaaaagcaaaaatgcctgtagaggaagagattttggatagtgcattaggtgttacacgtgaaacgcccgatacatttattttccaggcatgggatgatccggtggttttgatcggaaattcgattgaatatattggtgctttgaataagaataaggattcagcagaagctcatttgtttaaccacggttaccacggcttttcattggctcgtcacaatgtggaaactaaggggcaagattggcaggataatccgcacgcggcgcactggttcaacttggcaatggaatggctaaagagtgagtggggcgaatgatgtgaagcataaaaaatcttctaaccctaatgacaatatctatcacactatcgtcaagaatagaaaaattgaccgaatgattatgccttttgaagcggtgtactgcgtgtggctaatcattacgctggttcttagctttaagctatttgcttattcgattgacgcacaatttgtgctaatttctctattttttcttagcgggtgggtttcgtcattggttaagaatcatcgcatgaagaaaagtagaaaataagataagtaaaaagagttctcgcacgagaactcttttttattagaatcatttactttttatctctaaagaaaataacttccttagcagctacaaatggtccagatgacttgtaaacctttaatctaatagctttggcatcgacatttcttaagccaacaaccttattcttgctatcagacttccaagtcaagtgatcgccgtatggcttaaagttaacgccatcgcttgaaagctcgacactaacttcaacaggatcgccttggtgatcaatctttctaggtacccagcccattcgactcaagtgttccaaatgattaaaggtgaagtttaattcaagtggcttgtcttcgctgaccccatcaatggtttcccattcacttgctaacttcaaatcagtcaagtaatcaattggatgatccttaggactagctagactgctcgtgacatgaatgtcattaattgcatagttcattggatcgggcttggtaattgcgccaaacggatctgaccattctgaaactttgttgccagctacataacgcaaacgcagggtgtagcgggtatttggcactagttcatggaaagtaaatgaattaccatcaatgccatcatgtaaaatgccgttaacttcgatttgaacttggtcggttaattgcggccaaactactgttaatgaatgagagctaatcttgtctggatcaaccattggttgttttggtgaacgcaacagtgaatccgtaatagcgtgaaccaaagtttcattgccatatctgaagtttctgatcgtaatctcaattttagaatcggtaatatcgcgtttagctaacttaatttgtaaagcagtttgtttcttttcttggtattgatcaaattcaggcatccagctgtaatttgtgttaaagaagaagccttccttagcatgggcgaaggtatcaacggtaccgtactcctgcatcgggatttccttgtcgttgattttaacagtcaaaccatcaggataaccgtcacacatgatgttcaagttggtggtgttttccgtttggaaagtattgaaatcgccttgagttgggtcgatggtgatcgtcaatttgcttgcttctaaatcactcgtgatttgtgtagctacatggtttcttgaatagtcgttatagccgttatcatcgtaagtaaccattttactcttgccttgagggtagaggacatagttgcgttcgccgaggtcaaaaatagcgccgcctcgtacaaatactggtaaatgccaggatgggtaagactgcttattataaacgcgtccgcccaagtactttttgccatcaaataagtcaacccacattgttctgtggttaggcaagtaaaggttgtcttttcttgaattgccattaccatcttcgcgaccgttaacaattggcgaaatcaacaagttaggccctaacataaattcatggcccacctgtggggtgtagttgacttgttcatgtggaaattcgaagaataatggccgcaagattggctcaccgacttgagcgcggtagattagggtatataagtaagtctgcaattgctcacgtagttttaaataggctcgattaatttgcgtcatcttactattgtaagcaaatggggtcttactaaatttaccttgatcgtctaagttgaacaggattggggtaaatgccttccattcaaaatcacgaatggcaatttgagcattaccaccgccagcggtaccgtcaacggcactaccaactaaaggctggcccgaaaggctagcccccaaaaagccagcaacttgtgttggaatgttttcccagttgccgccaatgtcaccaaaggctagcattgttctattttgactaccagcaataccagtattagagaaaatcaacggccgcttacgcttcaaattgttgcgtaaaattagcgcatcatttttcaatacttttggatcggttgtgtccgtttgaataaaggtggtatcaggtgaagccttcggtgtgttgttttgactccaaagaccagcgctaacgtcatgtatagcggcgtattcactgaagctagccatggcttcttcgttgatttcttgcacatcatagttaggcacgatccaacttaatttaaaatgctgcttctggtagcgatcaaccattgcccgtgctgagaattgatattcttcttcgccattcaaagagcccttgccactagcatcttctggcttgttagttctggtgtaataattaccgtcttcaaacataacagcattacgttccttagctttaccaggctgccataaggtagttaaaaagttgccaacatgacctaatcctagtgcatatttaggtggcatcagcggcttacccgttaacatgtaatactttgccaaaatatttttgggtgaattacctaatagataaaaggtatcaaacatgttggtgtcgtgctttaagatagtggcatccggattgcttttaccaaagtcataattgccagcactctcagtattgcgcaattcaccaaagccggagttagcccagaagaatggcacttgggtcaaaacgccgcctttaccggtaatcttgtcgcgcttgattgaaatgatttcacctttatgactgaagtagccgttctgcatcccgccaccaaagtaaaattcattcttgtgttgcttcaaaatttcggtagtttgatcattgcctaattcaagtggactcagctgaaccaaacgattgcggtgcagcgtctcgtcaaagatgctcattacggctggcttttgttggaaaataagttgataattgccagacttaatgattaaggaatcgctggttgccttaggctgtgatttttcaaaatagtcattgttgaattgagacaggtcaacaaaagatgagtgattctcgtcaaacttcttagctggatcgagaaaatatctgaagatcccgtcagctaaaatataaagacgaacaatatcgccggtggagtagtgaagttcataataatgatcacgtttgttggcaccgataagttggcctagttgatgtctttctatttggttttgtgtcatatttattcttcctatttaaacttgctaccttatattataactaaaaatcaaaaaacttcttaagcaattgtatttactaatatgcatcaacaaaaaaagctctgctattatgcagagccaccgcgcgtttgcaagttatcgtcttactgcgcatgcatccatgatcattggacgcgacaatcttcctatgcacattatagcatgataaaaatacgatgcttaaactggtatttaccaattttgttagatataattaaattaacaattacgatttagacatataaagaaagaagatatttatgacttattacattcatgcagataaatttttcttagaaaacagaacagaaaacggcggctatcttgaagttcaagataatggcaagtttggctttttctatccagaaagcaaaaagccagaaggtaagattgtcgattatgctggcaaatgggttgcaccaggattagttgatacccacattcacggctcattgcgtgaggatgtaatgaagagtgattgggaaggtattaataagatctccaagggcttgcttagtgcgggggttacttcatggatgccaacaacgatcactgctgcaagcgataccttaactagaatttgtaagatgtttgcggaccatcaaggacaagaagaaggggcaaagattcaagggattcactttgaaggaccattcttcacggaagaacatgctggagctgaaaatcctaagtacatgatggatcccgatattaatgaatttaacaagtggctggacgcttctaacgggatgctgaagaagatttcaatggctcctgaaagaaaaggttccaaagaatttattcgtgaagccgttaaggaaggcatagtagttgttttgggccactcaagcgctagttttgaagaagcagtcgcaggcgttgaagcaggtgcaaccatgtttactcatacctttaacgggatgcctgatccaagccaccacacgccatcaatttctaatgcggcaatgacgcttaataatgtgaccgatgaattaatctgtgatggccaccatgtgcaaccatgtatggctaagactttgattaatgcggttggtcctgaacacattgccttgattactgattgtatggaagccggtatgatgccagatggtgattacatgttaggtgaattgccagtctatgtaaaagatggcatggctcgtcttaaggatggcgacaatttggctggatctatcttgcaattgaagcaagccgttaagaatgtagttgactggaatatcgttactccagaaaaggcagtgatgatggctagttatgttcctgctaagagtgcccatatcttggacaattgcggtacaatcgcaccagataaggatgccgacttcttgattttgaatccagatttgaccttaagtgaaacttacctaaatggtgaatcacgttataaggcttaatttgttagtctagttttaaatagtcctcattagattgagggctattttttgaccctaaattttggcaaatagtatacaattaataatagtaaagtaggtattatacattaggagaaatttattatgccagatggaatcagtcaattactagtactttttatgtaataactttcaattaattgaataatttgtactcttattgattaaagaaaagtatcacatatgtttcatgaatctcgtctagccaagtaggtgagattttttattacgtttctatgtaatcgctttcaattttaaaacaaatgtgctatattatgagtgtaaagaaattaagaaataaaaatattaaataagtttaagtaaaaggagagaggtgagttccgatgggcacttgagagtagaaagtcatatatatagaaaggtttgtgataccaatgggcatcgtaaattgaaaataaaatgtagttcaataatcatcaagtgatattaatgtacataagaggccgtgaaattattagtaggcatagaataataactatttgatgaatcacttggattaggattaagaaagattttcatacatgataaatattaataagaaatgacccttcgctggaatgaagtatgcgaagggtcatttaattttggcttgaaaaacgtttggtatttagcattattgttatttgttaaatataatatgaagtacatgtactaggccgatagagaggaaagttatgacaacagactcaattaattttaaaatcgatgcagaaagtaaaaaggtgatgattaaagaattagcaattattaatggcttaattcctgatgatgataatacagtagataatctaaatgattattttaaaaacttaggaatttaatggtttattggtcttttatctgatgtagtaaatcatgatttagtaagtcgtaatttagtaaaatataatttagaagatggtgatcttatgtttattggacgaaagaaagaacttactaaattagagcaatttaattagcgtggctaaaagatattactacttaaacttcccacacgcaaaattgcttgtttcattgtgattctgcgtgttttgacaaatataaaaggcacaagtccttttcattgctataattatattgaccaaaacataatttatttgcatgaaaggcttgtgccaatgtctattttaccatctcctgaccaacaaaatgaacaactattttcaaactcaatcatcagcttcatcaagaagtttcaggtgatcaagctgttgagaaaatgtggcttccgcaaggaaaaaggcattagcctgttcagcttgtttctttacgttttaagcaatgtctttcgtgaccgcagcttatatatgcagctgaaaatggatcattttcaagaaaatttttccaagaactcatattaccgttttatgcgcaacgttcacgtcaattggctccacttcaccacacgtctgtctgcgcaaatcattaataaccacttgcgatctttgacttcagaaaaacgggctgattgctttgttgtcgatgattcctacttctctaggaccggcttcaagaaaacagaattagtcgccaaagtttttgaccatgtatcaatgacttacaagaaaggttttcgcatgatgaccctgggctggactgatggagcttctttcatgccaatcaattcagtgctgctgtcttctcagaagctacagaatatgattggcgaaaataaagtttttgatcagcgcaccattgctggccaaagacgtatgcttgcccggactaaaggcacagacgtgatggttaatttaatcgaccaagctatgaaagcaggtcatcaagccaagtacgtgctgtttgacagctggttctcaaatccacatcaaatcgtccagctcaagcaaaggaagctggatgtgattgccatggttaaggttagctccaaaatcaaatatgaatttgagggagaacgcaaaaacatcaaacagatttatcgcagctgtaaaaagcgatgcggccgttctcgctacctgctgtcaatcccagtcaaagtcggacgccaggacaaagacggtgctaaaatagatgcacggattgtctgcgttagaaaccgtgccaatcgcaaggattggctggcaatcatttgtaccgacatgtcgcttagcgaagatgaaattatccgcaactacggcaagcgttgggatattgaggtttttttcaaaacttgcaaaagttatctaaaactaagtacggaatatcatggcctgtcttacgatgctttgaccgctcatgttgccatagtttttactcgctacatgcttatgtcagttgccaagcgggacgatgaagatgaacgcacgctaggcgagctgttctattgcatgattgatgagctggcggacattacttttagccattccttgcaattgattactgatgcaatgctggccagcgtaaagcaagtctttcatgccagtgaagcacaaatagctgaattcacggctgactttatcaatcgtttacccaaatacatgcaaaaattgttaaagaaaactagcaaaaataatatagaagcctaaagccaagcaagatcaagagattactggcttatttagtgtgggaagtttaagttactacttgttttcaaagtcaggctttacggattcatgtacggaactggcagaacaagtggggtgcaagttgattagttttgatgaaatgtaatatcatttttcctattatttttatctgttgtgatcggagtaagtactggtgtttaaaaaaggcgataatgttgtgttaattctaaagcctaatggcaatcttgaaatgaaaaaagaaaaaactaatttttgggacgaagtatcaaaaatgtctgctaaagaaacatactaacctagtgttggattatgaatcgacggattcacgatctgacactttttattttgtctaaaatagaaagtgaagataaagcaaatcaagtcttcagctttttagacacttgatgtcgtaaaagaaacggactgctttaccgcctattcttaagtctcttcgaagtctgtggacacttagatgtcgtgtttagaaaattagaattaataggttgataaagagttttatcttcacagcggaggttatattatggaatcacaaattattttcggtattgatgttagcagtaaatcttccacagtttgtgtggttaatgaccggatcaaacaaggcgaatcttttaaaatttctaatgattcctttggctatcaaaaactttatgagcaactgaaccaatatttgataactcctttagttgttttcgaagccactggtgtttattctctaagcctgcaagctttcttagaggattatcatattaagtatttgaagcttaatccgcttaaagcgaaaaagctaatggacaataatttgcgtcataataaaactgataaggtagatgcttatcgcctggctttaattcaatttaatgctccgcaaaagctgcgtgatccacagcccagagagtatcatgaacttcagaatgccagtcgctattatgaagagcttactaggaatatagttactactaaaaatcaattgcaccgcaaccttcaatccactttcccacaaattgaagaaatactgtctcatccatctggcagaatttattgggcgcttgttagtcttttcccacatgctggatatgttctagaaaagaatgagacacaggtaactcaaatgcttaattctatttctggaataggacaacaaagggcacgatacttaaccacaagattatacgcttttgctagagaagcttatccttatgattccaaagatagtattatcgttagagctattcaaaggaacatttctaatttgttttcactccagcaagaacgcgactatgtaattaactacatggaaaagctggctaaaacagtaaacgctcgtgctttatccatctatttgagtatcccaggaattgctagaattacagcagtgagattagtagcagagctcggtgatctaagacggtttagcacttcagctcaaattgatgcgtttgttggcattgatccaggaaggtaccaatctggtgaaaaagacagttctcttggcattaccaagcatggcaatcatattgccagaaaaatactttatcgagttattactcaaatggagacggtaaaggctacacagccatgtcatataactgattattatgacaagaaaaaacgatcttcaaatagccaaggctataagaaaatcgccattgcatcagtccataaactgatacgcacaatgtttgctcttatcaaacatgatcaattatatgattacaacgtagccaccgaaaataaaagactttagctgaaatcaaataatcaacttaagtataagcaacctatggaaaaactacaagtattcataggcttatttgtagtactttccgttatttagtatttggtctttaaacctattcgcatcattaataaactaaaaaatcaatttttttaatccattaaatcactgataatacttgactttgggtagaaaaaaagattgcagattgaagatttgggatatgatccattagaacaaagatcaaaaggtagagaaagaattgaggattaaaagttagaaaaggttcttggaatcttttttgatgaatttaggtaatctgaaaaaagaaacggcaccgctagataattagcgatgtcgttttagttatgcttagctatattagtatgtctgcttaatttatttaataaactgcgccgtcgtagaagttgtaacgagggcggttgaagtcgaagtcttttaattcactgatcttaattgcgttatcgcaaacaccccagctcattaagttgattggcttaccgtaatctccatcaggaattaccaacaagatgtacttgccttttgaaagggcatagccaagttccattcccagaccaacatcttcttcttcaggcaagtaaacgccaagcatgatgtcgctggacttaatccctactaagtcgttatggtaggtagctgatgcccattcaatgtcgtgcaagtattcagggtgttcatcaacgcggatacccttatattgattatcaagaggtacgtagctgttttctaagtcaacggtaggattttgctttagagcttccattgcttctttgtaagccttattttgcttttcgttgaaccaaccggcaccaaagtataaagtttttgtctttgccatatttttctccctttaaaaatgatttaccttaactttaccatcttttgggttgaaaaaaacgtcttgttaacttatggtgaaaatgttaattccacattagtaaggaaaaatccaatgactaatcaaaatctttttgcacctgatgcagtatttatttctaatcaaactaagcaagatttggtttttaaagaagtttacgagcatttacgcgaaagtggctatgttaagggaaactttttacaccatattgtcgaaagagagcataattttccaacgggattggatactgcaacactaggtaaaaatattcctaatattgcgattccacacaccgagggcgagtttgttaacacgagactgattgttccggttgcgctgaaaacgccagtcacttttcataatatgattaatcctagccaagcaattgaagttaaatttttattcatgcttttagataatgacccagatgggcaagctgcattattagctcaagtgatggattttttggctaatacgccagccaacgaattgcgcgaagtttttaattttactgatcctagcgcgatttatgcctttttagagcaaaaatttggtaagaaaaaagaagactagtttttagccttctttttctaatcttcaagataaatattacgcaacttcatgatgtctgcacttgagagcttcattacatcgcgtaggtagttattaataccgccatattcatcgtttagtactttaacagcatggtcaaggtattcactgcggacactctgaatgtcacgaatcgattgcagcacattttcatttttaccattttgacgggcatgttcaaccatactgtcgacgaaatccttggtagtgatgttggttaaaagatagtctttcttaatcgtatttagtggtacgccaagagcagataatgcaagtaatgcaccgaagccggttctatccttgcctgcagtacagtggaaaataacactttcgccatccaccgtattttcaagcaagacatcgaagaacttgcgatatgccttttgtgcaggttcactttcgatcatgtcttcgtaagcataatgcatgtgattgaagccaaaatcagcgtcgtcgtgtgcttgtgtatctaagtcagttaaactcttggatgaattggttaagtcttcactgaaaacaggatcgtaaatgtattctacgccgtctgggacacggtctggttgattatcaacttcttctttactacggaagtcgacatcgtatttaacgccgtaatcagtcaaaaactgcttgtcgaatggtgaaagatcggctaagttaccagttcttaataacttgtgcatcttgattttcttgccagacatagtttcgtagcctccaagttcacggaagttgcgtccactagttactccgattaattgattagttaattttttagtcaaaaaaattctcccctttctgttaatgaatgttatgaatattattttagcaacaaatcttcaagcaaacaatcaattaaaaagtaacggctttcaaaattatgctaaaataaagggtaagtactagtgcaatttataggagatgaattaacgtgacagataaaacaaaagaaagcattttagttccagttgatggctcagaatcagctgaaagagcctttgacaaggctgtaaaagttggtttgcgtgatggtgctcatgttgatgtattgaacgtaatcgatacgcgtcaatttatgggtgaaatgcaagacactttgatttcaggagataccatttaccaaatgactcaagattctgaagaatacttgaagagtttgaagaaatgggctcacgataacttcggttttgacgatgttgattatcacattcgttatggcagtcctaagcgcattatttcttacgacttcattaaggaccaccacaatactttaattgtgatgggtgctactggtttgaatgcagttgaaagaatgttgatgggttcagttactgaatacgtaaaccaacatgctttagctgatgttttgattgttaaaaccgatatgggaaacaatcctcttaagccaactatgaaaaagaactaatataagaataatcgccaaatgattctaaattcattggcgattatttttttgaaaaaagttgcaaaataccttgatagaacacgaatgtttctggtattattttatcaaatgaacgtgggaacgaaaaaggggagtgaaagataatgtttatgcaatcagaacaatttattgcaaaggatgtgtctttcgctcgtaaagacgttttttctgttcgtttagttattagaaacgtcattaattaggcttaattattgatcgcctttggcgacccgtaattaagtctttttttgtgatgtagagtagtttgttttatcactgtgtatttatgtttatggaggacataatgaaaagatttagaagaatcttggtagcagtagttgcacttcttgtagcagtagttgcaactgcgtgttcaaacaagagtaatagttctaagggtggttataccccaaagtcattaactattcaatttgtaccaagtcaagctgcaactaagttgcaagctcgtgcaaagcctcttgaaaagatgctttcaaagagattgggtatcccagttcacgtttctatgtcaactgactacaacaccgttgtggaagctatgaaatcaaagaaagttgatgtaggttttcttccaccagatggttatgttttagctcacaagcaaggcgcagccgatttgcttttgcaagctgaacgttacggtgttaagcaaccaggtggtaaagcaactaaccaattagtaaagagctatcgtgcagaaatccttgttaagaagggttcaaagatcaagaactggaaagacttaaagggtaagtcaatttcagtacaaaacccaacttcatctgctggatacgtattcccagttgctgaacttaagcaaaagggtttggacgtaactaagagttgtaagttagttactgttactggtcacgaccaagctgttttgaacgtattaaacggcgatactgatgcagccttcgtctttgaagatgcacgtaacatcgttaagaaggacaacccaaagatcatgagtcaagttgttccaatttactttactaagccaattcctaacgacactatctcagtaattccaagtatgtctaagtcattccgtaagaagcttgctaaggcattcatctctgtagctaagtcaaaggaaggtaagaaagttatcgaaagcgtatatagccacgaaggttacgcatacgcaaaagatagtgacttcaacgttatccgtaaatacgacaagatcgttgaatcaactaagaaataataaatttaattaagggagtttgacgattaaatggcagataagccaatgattcaattaaaagatgtttccaagatctacgacaatggtactgtaggtttaaagggcatcaacttaactattaataaaggtgaattcgtagtagttgttggtttgtctggtgctggtaagtcaactttgctacgttcaatcaatcatttgcatgatattacttcaggcgatattttgattgacggcaaatcaattacaagtgctaaaggcaagaatttgcgtaaattacgtcgcgatatcggaatgattttccagaactttaacttggttaagcgttctagtgttttgcgcaatgttttggtaggccgcgtagcttactacccaacttggaagactacttttaacttattcagtaaagaagataaacaaaaggcttatgaagctttacaacaagttgatttggccgataaagtttatgcacgtgctgacgagttatcaggtggtcaacaacaacgtgtagctattgcacgtgtgcttatgcaaaatccaaagatcatcttggctgatgaaccaactgcatcacttgatccacagacttcagtgagagtcatgaatgacttgaagatgcttaatgaaaaatacggcatgaccgtagttgctaacttgcacagtatcgaacttgcacaacaatttggtgaaagagtaatcggtatccgtgctggtcaagtagtttacgatggcaagatgaaagatactcctaagtctgtcttcactaatatttacaatggtggtaacggcagcgaggaggatgaataatgcctgaacaagtaaatcaattgcctaagcgtaagttcaaagtaatgaacttggtttggacaatcatcatgattgcaggactatttatttcaatcaatgttactaacacgcacattagtgtcttgtttgaaaactggaaccaatttgctgacatctttattcaaatgtctcatccagattggagctacttgaacgttgtttggcctaagttgattgaaaccatcaagatggctgtcttgggtacggtaattggatctgttgtcgcatttatctactcattattgattgcccgtaacatcgttaagaacaaggctgtgactggcattcttcgtgtgatcatgaacattgtcagaaccattcctgacttgcttcttggtgcgatcttcgtagctatcgtaggtatcggtccagttgctggtatcttggctttagcagtcttcacctttggtgtggttgttaagttgttctacgaagcaatcgaaacaattgatccaggtccaattgaagctttgactgccgtaggtgcaaacaaattgcaaattatccattacgcagttatgccacaaattatcacttacttcatttcatatgttctatatgcatttgaaatcaacgtcagagcatcaacagtccttggttatatcggtgccggtggtattggtttgaacttgcaacaaactttgcaggtcttcaattacgctcaaactggtacgatcatcatcgttattatcgtagttgttgtcttgatcgactacgtttcatctaagtcacgggaggagttaatgaaataatggatactacaatgaaaaaattacccgctaaacccgttgaccgtaagaaacaagttgcacattggctaattgcaattgccactatcgtaattattgtttggtcatgtactggtattaacttcggtggtattaaagccactgctggtcaaattgccggtgcaatcttctcaggtattttccatcctgactggagctatgtttacaatggctcaggtgaagacttggtctcacaattgtggcaaaccatttgtatcgctttcttaggtacattcatttccgcaattatttcattgccatttgccttctgggcagctcacaccaagcacaagcattggtacacttcaagaatcggtaaaattgttttggcaattatccgttcattccctgaaattgttcttgctttgatgttcatcaaggccgtgggtcctggttctgcagccggtgttttggcattaggtttccactcagttggtatgcttgccaagttgttctcggaagctattgaaaacttggaagaagggccaaacgaagctgttattgcagccggtggttctaagttccacgtaatcatgttttcaactatgcctaacttgatgccagctttgatttctaacaccttgtatcgttttgatgtttccattcgttccgcatctatccttggtttggtaggtgccggtggtatcggttatccattgattattgctttgcaatatcgtcaatgggaccgtgttggtatcattttgctagggatcatcattatggtggtgatcatcgactggatttctggttggatcagaaagaagttagtctaattcccaaaatttgaatattaaagaaagcgaagacgaaaagtcaatgtcattaagttaagacattgacattatatcgacagcttttaaagatcgaatcattttgattcggtcttttttctttttaaaataaaaagtgagcagagtttatttgcctttctgctcactttcgtcatattatctggtctttcatagaaagctgtgcctcttatgaaatcccttcactcaaatattttaaagctgatggatagtattatcaataaaatcgctgacaacattcacgatttctctgtatctgatcaagcttttactcgctgtcgtaagctcaattccactgatttgattaagttaattcttaacatgggagctggcagcctgaattcggaaatttttcatgcttttcctgacataaattctagaatgactgcttcggcttttgaacaacaaaaggctaaattaaagcctgaatgctttaaagaaattatgttagaacttagccgggcaaataatgtactgcaattattagataatcaatacttagttgttgcgattgatggctctgattttgatcaaccttttaatcccgaatcagaaaatatttttcgaggtaaagatggtcgaatatactgtcaacttcatgtaaatgctctttatgatgtcttgaataaattatatttacttaaacttcccacactaaataagccagtaatctcttgatcttgcttggctttaggcttctatattatttttgctagttttctttaacaatttttgcatgtatttgggtaaacgattgataaagtcagccgtgaattcagctatttgtgcttcactggcatgaaagacttgctttacgctggccagcattgcatcagtaatcaattgcaaggaatggctaaaagtaatgtccgccagctcatcaatcatgcaatagaacagctcgcctagcgtgcgttcatcttcatcgtcccgcttggcaactgacataagcatgtagcgagtaaaaactatggcaacatgagcggtcaaagcatcgtaagacaggccatgatattccgtacttagttttagataacttttgcaagttttgaaaaaaacctcaatatcccaacgcttgccgtagttgcggataatttcatcttcgctaagcgacatgtcggtacaaatgattgccagccaatccttgcgattggcacggtttctaacgcagacaatccgtgcatctattttagcaccgtctttgtcctggcgtccgactttgactgggattgacagcaggtagcgagaacggccgcatcgctttttacagctgcgataaatctgtttgatgtttttgcgttctccctcaaattcatatttgattttggagctaaccttaaccatggcaatcacatccagcttcctttgcttgagctggacgatttgatgtggatttgagaaccagctgtcaaacagcacgtacttggcttgatgacctgctttcatagcttggtcgattaaattaaccatcacgtctgtgcctttagtccgggcaagcatacgtctttggccagcaatggtgcgctgatcaaaaactttattttcgccaatcatattctgtagcttctgagaagacagcagcactgaattgattggcatgaaagaagctccatcagtccagcccagggtcatcatgcgaaaacctttcttgtaagtcattgatacatggtcaaaaactttggcgactaattctgttttcttgaagccggtcctagagaagtaggaatcatcgacaacaaagcaatcagcccgtttttctgaagtcaaagatcgcaagtggttattaatgatttgcgcagacagacgtgtggtgaagtggagccaattgacgtgaacgttgcgcataaaacggtaatatgagttcttggaaaaattttcttgaaaatgatccattttcagctgcatatataagctgcggtcacgaaagacattgcttaaaacgtaaagaaacaagctgaacaggctaatgcctttttccttgcggaagccacattttctcaacagcttgatcacctgaaacttcttgatgaagctgatgattgagtttgaaaatagttgttcattttgttggtcaggagatggtaaaatagacattggcacaagcctttcatgcaaataaattatgttttggtcaatataattatagcaatgaaaaggacttgtgccttttatatttgtcaaaacacgcagaatcacaatgaaacaagcaattttgcgtgtgggaagtttaagtatttagacatggttatccaacccagacaaaaaatggatgaacgtgaggcagccttaactatgttaaagaaattagcccaacaagaaaaagatttcttagtcctgatggatcgtggctatattagctttaatttaattgaaaattgcaatcgattaaaacattgccactatgttatgcgatcaaaatccggagatggtgcttttaaagaaattgtagctatgtcgaatcatgaatacgatattgacttatcatgcagagtaacttcgtcacattattattatgtcacccataaagatacagaaaagtttcttcacctgattcttcacaaaaagcatcactataaagctgttcgttcaaaaaataccagagatcaacgctgggattttgaggatatgtgtgatgttagatttagagtttgtaagtttagaatcaatccaccaggttcagacgatgagtgggaagtcctcatcaccaatttatatcgaaatgaatatcctctagctagaatgaaagagatctatcatcttcgctggggaatagaaacttcttttagggagcttaaatatgacttaagcggcatacagtttcattctaaaaaagatcaatttgtttatatggaaatatacgcccattttgcaatgtataatgccgtgagtttatcaataattgcgagctcaaaaccgtatactcagggaaaatatcaatatcaaatagattttaaaatggcctgttgtatctggcgacgatattttagtataagtgataattcagataaaaacttcacacaattactgctggatgtggcattttatttaacgcctattcgaccaggaagaaaagataaacgaaatctaaaagttaaattagtagttggctttccttatcgtctagcagcttgaactaatttaaacgactatcttaagatggcttatttgtgctatcaaaaaagacatttatcgaataaaataattcgataaatgtctcaaaaagtgtcatcagattagtcaatgtcttaacttaatgacattggacgaaaagtccccgcttttttgttagccgtgaaatttaaattggcattgattaagatgatcattaattaatccgattccctgcaagtaggaataaatgactacaggtcccacaaaggaaaaaccatcttttttcatttgtttggatatcttctgcgataggtcattagaagcgggaacgtcatcaaagctggcaatatcatgcacaattggagtaggtacaaaattttgtaaatatttggcgactgaacaatatttttgttcaattgccaaaaatgcccgagcatttttaacagcagcattaattttcattcgattacggataatgcccttgttttgcattaatgactcgatatctttatcggtcatctttgcgacttcagagatctgccaatttttgaatgcagctttaaaattgttgcgtttatgcaaaactgtggaccagcttaaacctgattggaaaagttcgagcacaagcatttcatacaaatgtgactcatctagattaagtttgcaccattcatgatcgtgatactcctgtactgcttcgtcttttgtatcgccccatggacagcgaataatttcttgattcatatttttctctctttctatgtaagtaatgttttacccctctattatttattacgcaaaaaaatgcgattattttttgagaaattatatttttatgtgcgaaataagggttttaacagctttttttgctataattaggtgtgaatttcgaggaggatcctatggaaaaattagataccatgatgttggctgatgatttagccttatcacaagataaaattttaaatggcgaacaagactttggcgctgaagctgtttacaaagtaatcgataacttgggcgttttaaataacccaatcaaggattacttcgacatgactgaagaacaatattatgaagctgaaagcgatcacaaactaactttgatcaagatggacagtaagttgactgatttgcatgatcgcattttaactaaccatgttgatggttttgttgataaggacgagatcaacttaacctacaatcatgagaatccatatgaagatgatttatacgatccaactactgattatcgtgaaattgtttacagcttgaaagttattggtgcggttcaagcaattgcagctaaggacttgcaagaagtattgtctaaagatgctgtattatcaattggacttgccgcatatgctttagcacacaacgcataaattatttgagtcggctggtaagcggccggctttttttgcttttttgaggcgaaaagatgaatttgtttaaacacacaaagggaatagttgatcgaatcgttggcgccaaaaaacgctctgcaatggataaagatagtgaattgcttgatccgatgcaaaaatatactactgttggagaatatcatgttggtgccgttgatggtactccacatggtaaggactatgttttaaccgtttatcaagacgaagacggcgtgttgcgacaagcacttagtccagagactacaacgaaattagcaccggaatatttacgcaagtataatgcgaaactaggtcattttcgtgcctttcataataagaagacagggcgccgttattgggtggaaaattacttggataatttcactacggaagtgaaaaagcatattcgcccaggcactaattcggtcaatatcggtgtaattacagatactcactttaaagataaagatagcagcgatttttatggctttaatgggctgcaacatgtgcaagaattttcttatttagatcaatctggcttgctagatttaaaagtccacttaggtgactggatcgatggctccgatgctggcctggtcagtgaaagtgaattggtcaagctgaacaagtcttttaagtcggatcaggtgccatatttgagtatcaagggtaatcatgatgaaaatgataagtttgatgaacatcatgatttaaaagcctcatttccagaaaatgaattcgaaaatattatgtggcccgatatgtaccgacaacgaggaattcattatgtttcgcgccagcacggggtggcatactttgatttagatgacgtgcgggtgatttcagttaatacgtcagatgttccatatgaattaaataaccgcgggcaaaagcgctatgacaataagattgtattggctgtgcgtgaagatcaaattgaggaaattatcgaaattttggctaattcttccaacaaaaagatcatcttcatgtcccatgccaacccgattaatcgaaaggggtctaatgcacttaagtataatggccgctctttgcacgaactgctagttgcttttaatcaacgtgaaaaaggtcgaatgcacgctagcaatggtgttccagcagaatttcgtttatcaaatagttttgattttaccaatatcaagaatgcgagaattattgcctacttctgtggacatcggcatcgtgaataccagtatcggatcaacgggattcaatatattttgtttaactgttctgccttgatggggccaaatcattccctaacaactaaatacaacaaaaacttagaccgaagaattgatcaaaataatgaatttgcgggttatattgtgaacgtcgatttaaaacgacaccgcattcaatcctttggctatggtgcagcttctagacgccgggtgtatttcatttagttaaggaatagtaaaggtatttggctattacaagtgtttagcttataataaaaaagttaaagtaaaaaaattataagtgtaagtatttttatatatagataaagtagagagaaattagcttaggggaagttgaaatatgtgcggaattgtcgcattttatgatccaaaaataaacgaaaaacaagccgttattggtaagatgatggctactatcaagcaccgtggacctaattccgacggttattacactaatgatgaggttgcccttggtttcagaagattgtcaattatcgatcttcgtgggggagctcaacctatttataatgaagataaaactagagcaattatctttaatggtgaaatttacaactttaaaccattaagagaacaattaattaaagcaggccacactttcactaccaaggccgatactgaagtattgcttcacggttatgaagagtggggcatggatggccttcttaagaaggtacgtggtatgtttgccttccttatttgggatgacaacaacaagaccctttatggtgcacgtgacttctttggtattaagccaatgtactacagcaaccaagatggccacttacttgtaggttcagaacttaagagtttcttggaatatccaaagttcaagcgtgaattgaacgttgaagctgttaagccatacctcatgaaccaatacaacgaccttgaagaaaccttctttaaaggcgtttacagattcccagcaggtcactggttcgaatacaaagatggtgaaatgaagacccaccaatactgggatgcggaatacaaggaaaatagtttaagctttgaagaaactttgaagcgtatcaacgatgacttgaaggaaaccgttgatttgtacagaattgctgacgttaaggttggtgcattcttgtcagaaggtattgactcttcatacttgactactttgcttaacccagacgatgttttctcagtaagttttgatgactcaacttacgatgaagcttcaaaggctaaggcattagctgacatcaaccactggaagttctacagtgacaaggttgatgccgacgaagctatgcgtgattttccagaaatgcaataccacatggatgaaccagatgccaacccatcaatcatcccactttggtacttgtgtaagttagctcgtaagcacgttactgttgcactttctggtgaaggtgccgacgaattatttgctggctacgttaactacgggatgcatacgcataacgacattattaaggtctttacttcagaattgaaaaagttgcctgagaagaagcgggttaaattggcacacaagattaagagaatgcctaatttcccaggtaaagttcacatgtacaccaatttagctgaaccgagtgaattttatgtcggtcaatcggttatctatgacatggattacccaactatctttacttctaaagatgctaatagcattttacagccaacgtatcgcaataaattgactgttaacggcatttaccaaaaagactttaagaaagtaaagggagtcgataatgttaagcagatgcaatacattgacttgcaccactttatgcttaacgatattgaacaaaaagctgataagatttcgatggcccattcacttgaagttcgtgttccttacctcgacaagaagattgcggaattggctaactctatcccaaccaagtacttggttaaccgtcatgataccaagtatgctttgcgtaaggcttcagaaaaagttttaccagatgagtgggctaagagacctaagcttggcttcccaactccaattaagcaatggttgaaggaaccacgtttttacaaacaagttcatgctctttttgaagaagaatttgtcaacgatatttttgaccaaaagaagattatcaagttacttgacgacaactatgaaggtgatggctcacatagacgtcaaatctgggctatctacaccttccttgtttggtacaagttgttctttgttgattacgaaaacacagttaagaaatatcaacacgtgcaacctgaagttgctaagctaatttcacagggcaaattactataattctagggagattttttgaggatgagtaaaaaatttacgccgatcttactcggtagtgatatcaacgtgtatggtatggcacgttcatttaatgaagcatatggcattaaagtgaaggccttagctgacgttcaacttgctgctactcgttattcaagcattgtggacgttgaattgcatcatggctttagtagtgatcctacttttatggacgtgatgcacaaaaagatggaagaatacaagaatcacgaggagccagttatcttgattgcttgtggtgatggctatgctgagttgctttctaagcaccaagatgaattgaaaaaggtctttatcgttccttacataaaatatgacttacttgaaaagttaatctctaaggaaggcttttatgaaattgcggaagaatatggcttgccttatcctaagactaagatcattacgatggatgactacaagtcaggtaagtacgaggatgtcccatttgatttcccagtggaattaaagccggaagatccagtttcatggttgaagtgtcaatttgaaggtcggaagaagacttttgccattcaagataaggctgaatttaaggatatcgtaactaagatttatactcatggctacaacgctgaccttattttgcaagactttattcctggtgatgattctaacatgcggaccttgaatgcttatgttgataagaaccaccaagtaaaaatgatgtgtttagggcacccattattggaagacccaactccacaatcaattggtaattacatggcgattttgcccgagtacaatgaaaaattgtacgaagaagtacaacaattccttgaaaagttgaactacactggtatggccaactttgatatcaaatatgatccacgtgatggtgaattcaagttcttcgaaatcaacttacgtcagggacgttctagcttctacgtaactttgaacggttacaacttggctaaatggtacattgatgattatgttgaagatgccttgaaagataaggaaacagtttatggtaataagcttgaatctaaatacaagctttggttaggcgtgcctaagaagatcttcaataattatgcttatgacaacgactataagacgactgctgacgaacttattcgtgagggccgctatggtactactgtcttttatgacaaggatagaaacttcaagcgctggttattgatgaagtacatgttccataactacttcaaacgttacaagacttactatgaagttaataagggtaagatctttgacgaagaaaataaaaaattaaacaaatagtttaaattgagaggtaaaaaatgcctctctttttttctaaaaaattttagctgaatcatttcccaatttaatggtcttttggttaatacaagatatattcatctatatttgaacataatacaagatgttgtgttttatgctatgataaagacacgatatttggagtgattgaaatgctaaaagaagaatttaaccaacaaaatgtaacaaaatttaatacgcctaaaacttttgttaaacgtgatgggtcaaagtatccgttcgcaatttttaaactcaacatggttttgcataacctagatttagataatgtagcacctgctgtaattgaaaaaattgtggctaaactagatgctgctgatgaagtaaatgcacaagatgtagcagttgcttttagagatagcctaaatgagttgggttatttggatgaagctaaagcttatgtgcaataccgcaagcacgatgaagaggaatggattaaacaaaccgatactcgtgcacggttaaagcgaatggttaatggtgacccaacgattgttaacgagaatgccaacaaagatagtgaggtcttcagtactcaacgtgatttaactgccgggaccgttggtaaaacagttggtttgaccatgatgcctgagcacattgctaaagcccacttgcgcggtgatattcactggcatgacttggattacacaccactttcaccaatgactaactgctgtttgattgactttaaggatatgctaactaatggcttcaagattggaaatgcctatatgactagtcctaactcaatcaatgtggctacacatcaagttacgcaaattattactaatgtagcttctagtcaatatggtggctgttcttttgatcgagctgatgaagtgttagctccttttgcagagaaaaactaccaaaagcatttaaaggatgctggcaagttcattgatgatcctgaaaagctggaagaatatgctaagagtcaaactaagaaggacatttacgatgccatgcaaggcttggaatatgagattaataccatgttctctagccaagggcaaacgccatttactactttaggttttggtttaggtacttcttggattgaaaaagaaattcaaaaagatatcttgcgtatcagaattaaaggattgggtagagaacgcagaaccgcaattttccctaaattagttttcaccattaagaagggcttgaacttacatccaggggaccctaactacgatgttaaacaactggctattcaatgttcaactaagcggatgtatccagacgttttaatgtatgatacgatcaagaaaattacaggttctttcaaggctccaatgggctgtcgttcattcttacaaggctggaaggatgaaaatggtaaggaagttaactcgggcagaatgaacttgggtgttgtaactgttaacttgccaagaattgccatggagagtcatggcgataagaagttattctgggaaatcttcaatactagaatgcggacttgccaccaagctttagcctttaagggtagacgtgcaattcaagctaagcccgaaaatgcgccaattatgtatcaatatggcgtctttggtaaacgacttaagccaggtgatgatgttaacgagcttttcaaaaatggtcgagctacgatttcgttaggctacatcggtttgtacgaagtagggacagtcttttatggtcctgattgggaacacaatgaagaagcacatgattttacaattgagatcgtgaagaaaatgcatgacttgtgtgctaagtgggaaaaagaggacccatatcattggcattacagtttgtactcaactcctagtgaaagtctaactgatcgcttctgccggctcgatacggcaaagtttggcaaggtgaaggacatcactgataaggaatactacactaattcgttccactatgatgttcgtaagcacccaaccccatttgaaaagttgacttttgaagcaccatatccatattatgctgcaggtggttttatccattattgtgagtaccctaacttgaagcaaaatccagcagcccttgaggcagtttgggattgggcttatgacaaggtaggctatctaggaactaatacgccaattgataaatgttataagtgcggttttgctggtgaattcaagtctactgccaagggttttgaatgtcctaagtgtggtaatcatgatcctgctacttgtgattgtgtcaagcgaacttgtggctacttgggcaacccattgaagcggccaatggttcacggtcgtcatgaagaaatcgtgcaccgggttaagcatatggactttggcatggaagatagtttagctaccgaagaagaagtaaaaaacggtgagtactaatgcctgaaaaagataaaaacactcaagaaggaccagatatccggagtaatttgatcaaggttaatatgggtggggataccatgtttgtggatcctgaccaatataagccacagttagatcaccaacgtgagttaaaaagaatgcaccgcaagccgaaaaatccaaaaccacaagagtggaagactgaggattattctaaacataaaattgcggattataagccatttaactttgttgatggtgaaggcgttagatgtagtctttatgtttcaggctgtttgttcgattgccctggttgctataatttagcagcccaaaactttaattatggttttccatatacgcaagaattggaagaccgcattattaaagacttgggccagccatacgtgcagggattaaccttactaggtggagagccattcttgaatacttgggtttgtttaagaattattaaccgaattcgaaaagaatttggccacagtaaggacatctggtcctggtctggatatacttgggatgaattgcaaaaagaaacacctgataaaaaggaaatgttgtctaagatagatattctagttgatggccgctttatgaatgatttaaaggatttaaccctgcaattcagaggttctagtaaccaacgaattattgatgtgccaaagtcgatgaaggcaggcaaggttgtcatctgggataaattgcaaaaataagataaactaaagtccggaatgattttctggacttttttgctaggtgaaaaaatggaagaaaaaaatattaaacaagttgatcaaatcatgacggccttgacccaagtgattgatccagaattacaagttgatgtagtaaatcttggtctgatttatggcatcgatatcgaaggagataaggcaaccattaagatgactttgacaattatgggttgccctttatctgattatttggaacgacatattcaaaaagctgttctttcagttgctggaattaagtcttgtgacattaagttggtctggtatcccgtctggacgacagagcgtctttctagtgcagctaaaaagcaattaggtgtaactaaccatgatgatcaaattaagcaggagaaagccaccaaagagaagattatcgacttttcagtaccgatcaagaaaatggcagatgaataccctgactttgttcaaattatgtacgattgtggttttactagaattaaaattcctggattgcttaaaacggtggggcgtgtgatgaccattccattgggagcccaggcaatgaaacttgatttggctaaagtgaaaaaagcatttgaagataaaggatacaaggtaatcaatgactgataaaaaaagacaggatgcaatcctgaaaattttgcattatattcaaaacggcggcgattttgcgaccgcgaagaagatgtttcaagaagaattcgatcaggttgatgtggccgaaatcacagcggcagagcgcgaattaatcaagcaggggttaaacccagcagagattcaatacctgtgtaatgtgcatgccgatgtctttaagggtaatatcaaggagaatgcggtaaatcctgattttgctactccggggcacccggtgcatacgattaagctggaaaatatggtactgaaatcattggttaatgacgcactcttgccagatttgaaaaagtatcaagcaggtcaagatacactggataaaatcagaaaagaattgagtgatttggcaacaatcgataagcattaccgacgtaaggagacctcgctttttccattaatgaataaatatggcattacagctccgcccgaagtgatgtggggcgttgatgatgatattcgcgatttaattggggatgcaagcaagattgctggtgaggagcatccagataaagatcagttggctgaggcaattaaaaaggcgagtcatgaagtgcttgagatgatctttaaagaggagagcattatgattccgatgattgacgaggtagctgatcaagatgattggtacaacgttaaacgcgaagagagtcagattggctataccctgattcgcaagccaatgaattggaagccaaaggaagctaaaaaagaagcagggcctatttctgttagcaatctttcatccttcctcattaattttgaagaaggaaggttaaatttagagcagttaaatgcaattttggatatgttgccatttgcattgacctttattgatgaacacgataaggtagcttattttggcggcggtgctgagatttatccgcactcgcgcaatgctattggcaatgacgtattctcgtgtcatactgctaaaagtagaccgttaattaaaaagatttttgcgcaatttcattcaggtgaagttgacaagtatgagtttcactttactccacacaagatgaagcgctgcttatacctacgctattatgcagtacgtgataaaaatggaaagtatctgggttgtcttgaggtagcacaagatgtgacagaaattagaagctggactgaagaaaagaaaaaaatttaacttgttgggctgtgttctagtaagggatgcagctttttcttttgccctcgtgcaaaaaatcacaattcttgctagactagattgagagaatgattaaaaagaagggaagagagaaaatgcgcacagcacatggaaaacaaccagctgatgaaatcaaattgcattggcttcttctaggccaattactaacgtggttgggttccagctttatttggccattgacttcagtttacctgcacgaccatcttggcgtttcactagctttagtgggtgtcgttttactgttcaactgtgttgcaaatatgattgggtcatttatttcaggctggtgctatgaccatatggatccatatgtcttgctgattgtgggggctgctttagatgcggctgtcttgtttggcatggctttgaatcatagttggccgttatattggctctggatgactttaactggctttttgggtggctggaatggagcattgattaactcgattgctactagtattaaatctaagccaggtcgttatgtcttcaatatgatctactttgctcaaaatgttggggtcgtttgtgggacattagcagtaggttatctttatgattattcagtgactttattatttgtcattgctggtcttttattcgttggcgtttgcgttaacgcaattattaattatcggccaatgattcagttccacaaggagcgtttggctaacaaaggcgaatcaaagaagaagacctttgagccgatgccaaaatacaatctgattatgtcaattggcttttttgttacgatcgctgtaatttggttgatgtacatgaactgggaatcaaacttgtctgtctacatggtttctttgggcattccttttcatctgtatagtttgttatggaccatcaatgccggaattattgtcatcgtgcaagctatcttaagtcgttttactatctttaagagcttatttagacaaattttatttggcactttgatgtttgcaatttcttttgttactttgatttttgccaaagattttgcacatttcgccttatccatggttatcttaactttaggtgaagcaaccgcaatgccgtcgattccaacttatgtcaatgatctgtcgcccgattctagtaagggcaagtatcaaggcttaaccttgtctgcatcgtcaattggtcgagctctaggtccattatttggtggtttaatcattgaagatttcggctatattcaattctttgctgttgctgcaattggtatctttttgcttttagtcatgcttattccaatgcatgcgaaactacagaaaaaactaaaattatttgtaaaataaaaacaacatgatagcgttaatttttttataatgctatcatgtctttatatgaaaaatttttccactagggaggtaatttaatgtattttaacgtacgcggcggtgctggtgacattactaaggctaatacgcgtggtgctagttaaatcgttctagacaataagccaaattataagctaaaattgcaatttccaaccggctttgaaagcctatcagactacgtgctcgattgttctcggcattgtaataggtcagaagcgaaaagtcgctttcaattgttctgcgaatagccatcaattgatgatcattgtgctttttagctcctgtcatatttttacgatatggtgtccaaagttcgtaacccatttgttttagctgttgatgcagttctttgcctaaatagccttcgtcgccaagaagatagtaattagatggatgggtattttctatcagttcaactgtctccctggcatcatgaactgatgcctttgttacgacataatcaagaatgtaaccgtcatcgctaacaatggcatgaactttgaaaccatagaagtaaattttcttggtggccttataaccaatgttggcataaccgcgaaaaattttagcacgatagtttcgaattggttggcaaacaggtaccggaaagctgtcaatgatcaagaactgtccattcaggtcaacctttttattcatttcttgccgtatctgataaatcaattgcaatagctgacgtgaacgccgattaaaacgtgagtgtgataaacaattgaaacattcacagaatcttctttgtgattcaattcctgtcttagcttgccagataagtaaagccaaaatcagactgtccgtagttttaatttgatcaatatttcgccgatgagtaaactcagccggtgcatacaaacgataccagtgccgacaaattatcactaaatctttaaaactaacttgtaaatggtggctaaaacgcttaagcttaaggcagttcaatcagatcagactcttttctattattactatttacaagtcgagtctaacaagattggacttttttattaactaaaacgatttaactagcaccacgcgtaggctaatacttcagcgcgtctacaagataatttatatttggccgttaactcagaatggttggaaaaggccaaaataccatctgatcgttcaagaaccagttcatttgatgggatcgatcttaatattgaaaagaacttgatgcaagactttgcagattttgctgctggtaagaaggaactgcctactgtgcctaacttcaagaaggcagttgagctttacaaggttgctaaaaactttgacaagcgaaatgcggatggtgccgcacctattcaggcagatttgcacgaaattttagacttgcgcaacttcgctgactttaacttgaaggcagcagatttttacaagaatggttttgccgttccatttgctttcagtgttgaagcagatatgaagaatactaagattcactcattgaattttggtggtccaagtactttcttgccagatacgactacttacaagactccagctgctgagaagttattggatgttttgaaaaagcaatctattaagttgttaacaatggccggacttgatgaaaaggacgcagaagattacgctgacttggcaattaagtatgacgctaagattgctaaggttgttaagtcaactgaagaatgggcagattacccagcaacttataatccagtttcattgactgactttgaagcaaaattcgattccttcaagatggattacttcttgggcggattatttaccaagaagccagaacggataatttcaactgaaccacgttacttagatcacgcggaagaattgttgaatgaagaaaactttgctgaaattaaggcttggatgctggttaagtttattaatggcgtagcttacagcttgtcacaagatttccgtgaagctgcctttccatttagtcaagctttgtcaggccaacctgagctttcaagtggcgttaagcaggcatatcatattactaatggtgacttcggcgaagtagtaggtgtctactatggtcaaacttactttggcgcagaagctaaagcagacgtgactgatatgattcacaagatgcttgatgtttatgaaaagagaattcgtgaaaattcatggctttctcaagcaactaaggataaggcaatcgttaagttgcgcgctttgatcttgaagatcggttatccagacaagattgaagaaatctatgaccgtttacaagttgatccaactgctagcctttatgaaaatgaagtgcaatttggtcgggaacaaattaagtacaatcttgagaaattgtaccaagatgttgaccgtacggtatggttgatgccaggtgatatggttaatgcatgttacgacccacaaagaaatgatttaactttcccagctgcaattttgcaaaaaccattctatgacttgaaacaaagtcgtgctactaattatggtggaatcggcgttgttattgcacacgaagtatcacatgcctttgacaataacggtgctcaattcgatgagtttggtaacatgaagaattggtggactgatgaagattttgctgaattcaagaagagaacgcaagctgaaatcgacttgtttgatggtattgaatatggccctgtaaccttgaacggtaagcaaatcgtatcagaaaacattgccgatcaaggtggtttgactgctgctgttgaagctaacaagggtgaaggtggcgacaagaaggcaatgcaagaattgtttgaaaactttgctcgtgtttggacaactaagcaattgccagaatcaattaagacgcaagtatctatcgacgttcacgcaccaggtccagaacgtgctaacgtgcaatcacaatgccaagaagaattctataaggcatttgatgtgaccgaaaacgatggcatgtggcttgctcctgaaaagagagtagtaatttggtaagtaacttttcttaatatcgagtatgaaaaattagctaaattacatataagctcctataacaagaatgactacagtgctgctactacactgcagccctttataacttattacccattaataaattttttgcactaaaaaaggctccctgttgggagtcttttttagtttagtaattatttagttttagctgtcgagtaatcctttggcttaatccgcttaatgtaagatggatttggtcgacccaggattaatggtacacgctcgattacggtatcggcgtattctaagccgaaccaggaagctgggttagaagacaagttttgcaagcgaacccgcgcttccacaagccatttttcatagccaaccaattgtgtttgtggactgatgacgtcgttaacaataacgaatgagaagtcacctacgtcacgacctgggctggtggtgtattcctgtggttgtggctcaatcgtaccgtcggcgatcaagtcatgaacgatctgacgaatgtagacattcacactagtttgcttcttaaagccgaggtagagctgaatgttaattacgttcttcgtaccgtaagtgttaacagcatattcagcggtaaatggctcgttagtaacattgacagtgacaaaccagtaagcctttgctcgtttaggtcttttatccaaaattgagtacaggatttcacgtttgatgaacttattgtacttaacgttggccatgtaaaccaagttggtagcataagttgggtaattttcatcgtgacttaagttcgttaacatgtcggtatattcatctaagcgaacgtaagcattgcgagcttcacgcttgtcacgaaccttgttgccgtaataccaaacatacattatgaagccgatagcaccagcgatgaagagtgaaacgtaaccaccatgagtaaatttagtcaaacttgaaatcataaacatgatgtcaaggacaccgaagaagatcaagaagatccagttccaaacagtgttgactttcttcattactaaccattcataaagcaggatggtagtcattaacattgaaattgtaatggacagaccataagctgcttccatgtgagctgaagtttggaaatataagacgattgcgatagtagcaacacagatacccttgttaatggaaggaatataaatttgtcctttttcgttagatgggtagttgatgttcattcttggcaagaacttcaagcctgaagcttctgcaactaaagtgaatgaaccggtaattagggcctgagaagcaataacagcagcaatagtagccaaaatgatggcaaacaatctgatgttagctgggatcatttcaaagaatggattgagcacaccgccgtctgcaggacggtaagttgggttgttcaaaatccaaacgccttgaccaaagtagttgagtgacaagcaaacaaaaacaaatggccaagaaccaataatattgcttttaccaacgtgaccaacgtctgaatataaggcttcggcaccagtcgtagctaggaaaattgaccctaaaataaaaattccagccttattatatggactgactaataatctaatagcgtaaattggattgattgcttgcaagattgaccagtcaccgaccatgttcattacgcccattacacccaaaaaagtgaaccaaaggaacatgattgggccgaaggctttaccaatgatactagttcccattttttggatagaaaacagaactagcagaatgactacagtgatggcaataaccatgttttgagtagaaacgggtacattgccgccaaagttcagtcctttcagtccttcaatcgcagttgtaactgtaactgctggagttaaagtaccatcggccaaaatagcggctccaccaattagcgctggtagaactaaccatttagctcgttttctaaccaatgtgtataaggcaaaaatcccaccttctccgtggttagttgccttgagggcaataattacggtttgtaaggtagttagtagcgttacagtccaaagaaccaatgaaattgatccaatgataaagtcacgatttacattaccaatgccgccgttgccttcgacaattgatttcataacataaagcggactagtaccgatatcgccgtaaacaataccgatggcgattagtaagccggccgcgctcatgcgtttagctttattattcattatctcgttatctcccacaacaaaattgtagttttaataaaaaaagaaaatgccacgatgacattttcccttattgtacctattttcgtctatttcgctggacaatgcaagtgagatttgtcagaaattgaatctagaatttggtgatgataaagttaatgcattataataaaaaatatgcagtaaaaaagctcccatacagggagcctttttgatataaattatgaaagtgatgaaggaatcttagtacgttggtcttcgtcccatttttcccatgcttcataagtaagcatttcttctggcttaacaccagtcttttcttccatggccttaagcaagtccttaaagttgtagtcgtggtattgtaacacatgatcaaccaacttcttgcgtgggaagtggatgttgtttaaaacatagcgattgatatcaaccatgttatgattttcatcgtaaaggttgataacttcaagatcgtcttcatcgaattcagcgatgtagaagttagcgaagacctttaagtaatcaggttgttctttgaattcttcctgtggcatagtagtcttgttagcttctggcattacgactttaaagtcgtcgttttcttcattttctttatcagcttgagcttgagcgttcttttcttcttcagtcaaagttgttacccctttatttataaataaatagatacaaagtcaataataattttacagacttctacaaataaaagcaaatagaagtggttgagagatgcaaaagtatagaagtcagttttgattagtaaaatggagtaaaatgaagtaaaatataaatgtaaaaagtaaaatgaagtaaaatgaggaaaaatatgtataatgaaaatccttttgatgctgaatttggcgggatcccagagctatatcttgattttaatgatgatgcagttaaatttgctcaaagagcccatcgtctcaagaaacatccaacttattctctctttattacaggggtacgaggttcaggaaaaacagtttttatgaacaaagtgggtaaagaactaaaaaaatataaagatactatggtagtcactttgcacaattctgatgatctttttcgaatgatgtatatcaagctagtgcctatgctagataaaatcaaaaaatggacgccatcaatttctattaaagttccttttgtatcagtagatttcactgaagcaaatgaaaagcatgatgaaatatattataaagtagaaattaacaagattcttaaagctttgaacaaagtggggattcgtgttgcattttgtattgatgaagtgtcaaatacacccacaattcaaaaattggctgaggaattcaacgactggagcctaaataactatcaagtttcagtgattatgaccggactattaagtgaagtggcggaactatcaggcacacataatttaaccttcttggttcgggcggatagatttcacgtctctaaactatttgcgtcgtcaattgccagaacttacatggatgtattagacataacagctaagcaagcagaaattttggcagatatgtcaaaaggctatgcttatgcatttcaattgatcggagatttgatgtatgaaaatttaagtcaaaagatgacgtttgaaaaagctttggaatatactaaacttagattccgtgatgtacttttcaaccaagcgtatgatgtaattgctcatgaattaacggatgtggattttcaatttttgtacgctatggcgcaagataatagtattagttcaattattaggactatgcaaaaaagtaagcagtatgttaatagctatcgtgcaaaattaattaaatatgatctaattaagccaataattaggggaaaggtcggctttaccttacctttgtttagagatttcattcaagcaaagtatgatgagcttaactggggctagaatttattgaaaaaattcggcagaaaatcacagaaatgaacgcagatccagtttggagggatactattatggactatgagactaagctagctgaagagcgtgaatacggtgaagaaaaaggaattttaagtgcaattaagaaaattatttatcgtaaccggagctatggtgtatcagattccaaaactttggaggatctgacagaagactaccatgattctgtttcccgggatcaaattgaacaaatgatgaaagaagcctaggtctaatgaaaatagccgctgctcaatgtgagtaacggctatttttttacttgttatcatcagcagcagagctggaacttacggcagatgattgatcgttgcttgaggaagccgcgctggattggttgatggatgataatttaagtaattattcttttgaaaaaatatttcttacttgttggagtaaattatcgaattctgttgattcttttatgtggccgattatttttccatgacgggcaatgaaatcatacgatagcatttgaaataataatgcatctccatttgtgtgactagcataatctagcacatagaatctaaatggatcatctgtaatatggttatgagtaattgctagtcctattactaatccagactttttagtgtaagcatgtctgctcactactaaatagcgtctacgaatatttcctttttcagaatcatgtccacccatttcgtgaccagcatgtggttcagcatcgatcattattatgtcaccttgatggacatcaatccttctcatttgctagttcctttccgacaggtttgacttctctaggattgtatcctaattcttggtattctcgctttatttcagtatcataatcataatcgtcataagcggggtctgaccataaatcataattgtttttagcaattcttttgtatacaatatcaccgtttttatttacatcaacagagaattctgtattaagtggaactttgatagtacttggaatggtaagcactattgaatttccttgttttctagccttgactaccataataagccctcctcgtattatataaattgtaattagtcatattgtgataattaatcaaattagtatttgctttttgatcttcacatgttagcctctaattgtcattggctttggtcaactggtctaggttatcacctcctgcagttttgtctgctttataagtctgccacccagacagttcctttatgctctaactcacatgctgtattgattgcttctttttgctagtccttgagcaattgggattaggtgcagctttcaaagaagcaaccagtgaatacttatactggcgagattgaacttaagaactgtaattaggggttaacatgtgaagatcaaaatctatgatcagaaatttgaaagaaaggaggccatttccaatgaaattatttgtcggtattgatgttagttctaaagatttacaggtcgttgcacttgattcagaagatcaaaacaaacgcttaattaacgatagctttgtcaatgatctttatggtgctagtgaactgaaaaaacaaattttagatctagctcaaaataaacactatgatcaaatcattattggcatggaagctacatctatttacagttttcatcctgcttactttttccaaaatgacgaagatttacaaaagctcaatgtagagactgatgtaattaaccccaaagaaaccagcaggtttcataaagtctttgaagaaagtaaaactgatcctctcgatgcttattacattgctttgtatctaagctttggacattatcgagtaagcattgccagacaagacaactatcttgctttagagcgtttaacgcgtaccagatatgaattagttcaagaactgactcgtaccaaacagcacttcattgaagctttatattatcgggttaataaactaatcactgtcgataaagataagattaatactcctcttttcggtgctacaatgatgtctattgtaaccgatagtaaaactctggatgagatcgcggatatgcctaccgaagacttaatttcttacttacaggttaaaggcagaggacgcttttccgatccagataccttggctaaagcaattaagaaagctgttagaggttcatatcgcttaggcaaagtaatgactgattcaattgatgcagtgctttctgttcattacaacatgattcaaagctttaatgaatctattaaagatctagaaaaagcaattgatcgtatcgttgatgcattaccagaaagcaaaattctggaatcaattcccggtattggcaaaacctatacagctggtattatcgctgagatcggaagtatcgatcgctttgataaagaagaacagctggctaagtatgccggcctaacctggaatcaatatcaatcgggagatcacagcaacgaacatactccaatggccaggactggaaacagatatctaagatattacttgattgaagctgccaatctagcaagattacatgatcctgttttcaaaaaatattaccaaaagaagtatgatgaagctgtctactcgccgcataaacgtgcttgcacattaactgcaagaaaattagtacgagttatctttaaattgctcaaagatgacaaactgtacaggacaccgaggtcttaatttcaaaaattggtctaaatttaaaagtaaacaaaagtttaacattaaaaaaatcaacctttaccaaggcttagtttcatatactcaaatttatgatcaaaaagaacaaatatcatcgcctttcatttgacttattaccacatgacttatgctaaaaatattttattatttaagtatatactgtgaatacagtgagcacaaacaaaaggagccacaaattggctcctttttcgtttgcttacttgttatcatcagcagcagagctggaacttacggcagatgattgatcgttgcttgaggaagccgcgctggattggctgctggatgattgttcctgctggtgatcgcttgaagaagatgaagaacttgattgatcatctgacttcttgtttgatgagctggacttcttggactgctctttatccttatcagatgaggattttgcagaatcatcctgactagaattatctttgttagaatctgcatcagaattattagatttttgctggtcaggatcagcgttctttttattggaattattataggaagtattattgtgcgtttgagtgttggcatggctaatgtaagcaccggcgccacctccacctaagatgaacatcgcagcaataacaccccaaaagactaatttcttcatattaagacaactctcccttatcttagaaaaaatattaacgaatttgagccaattggtgactttgaatcgttagttatagtgtaagacatctggccggcaggttgattacaaaatactcaattttaactaattattaagaggtagaagaaaaatatgaattacgaattaactgaacaatcaatccaatatgtatttggcaacaagaagtataagaatgggcaaaagacccgtaacttgaagaacgtaaagactggcgctaaggcagatgagttgcaaaaggtgggtcaagcaattgctagtttgcaagaagactcacttgatgaagcatacttagtgcagaagtcacgtcttgtaccagcagctgaataaattaacgaacatatttaggaaataaggagaaaaaatgatggctaaaactactaagactatgaagttaactttcttgaacggagaaaagaagaaaattagtattacgttgggggatgcagtcgataatctaactgcggatcaagtacgcggtgcgatgaatacgattgcggaagccaatgcattcgagaaagacggtgttgcatattatcacactcctcaatcagctgcatacattgaacgcactgttactgatatctttaatgattcagcagaatctgcagttgagcctgcagctaagcaagactaatctggacttgcttgaccaactaattagcttggtcaaaaggctcaggagaaaatatcgcaagatgtagagttcacacttagacctttaacagaaatcgtatagtaatattactttttcaattgattttgttacatcgttgtaaaatttaagaaaaagtaaagaaacagtaaagcgggcgtatgctcgctttttcttgttgtgtctaggattacggcattttgttattttagatttgtgtgaatggtattgggatagggaataggtgaattattacaaaagcaagattgtagtcaatttaacttgctattttttcaagaggttagtacaatatgaatcgtggtaagtaataggacgtgcttcaggcgtgtcgcctgtacgcatgctgatccttcagcaatgactactacctcatgagagttataaactcatggatcttgctttgaagaattttgtacattataggctccctacatgctgaacctatggcctattacattttttatatttcaaggaggaaaagaccacatgaagaaaaatttaagaattgttagcgctgctgctgctgctttattagctgttgctccagttgctgcttcagctgtttctgttaacgctgctgcaaccactaccaacactgttgcacctgcttcttctcaagaagttactgaccttggtacattaagaggcaccattgttcttgaccgtgcttcaaatactcaattcagtatcaaattgagcgatgctcaaaaggatgctatcttacaattaggtggcgatgcattaaaggatgctaagccagaagatatgaagaatattactgttaagtcagcatctgcttcaaactcaaatggtgaattccaacaagttgttacattcactgttaatgacaaagcttaccaagttactttaaatgctaagttcgctagccaacaaggtactccttacttctacaacaaggatactaacactgttgtaaacgatggtagcactgtttcattaaacaaaattgctaacggctttagttcatcagatcttttgaatgctattcaaaagcactatgcttggaagaccagtgatcaatcaaatgacactattaatatgactactaccgcttcagatgtagaaagtcaattagtagctcaaggcttgaagcgtgcttcaaacggtaactttgattatccagcaaacggtttcaaccttaagttgactgctaagtcagaaaatggtaattcaactacaattactgtaagaattaatgcatcagtaaactacaatgcacctgcatttgtatttgacggcaacgtttactacaatgacaacgttatgtcaaatggtaaaacttcaggtaacttagtacttaaggacactgacaagaccaaagttattgtaaatggtaaatttaacaacgatgctgtaactggtgctgttaaagcttacgtacaaagtgcctatggtactggcttcgacaagactccagcaaaattagctgctcaccaacaattgatcaactcaagcaatattaagattgactcaagcaaggttaacccaagtgttgcaggtttgtacccagtaactattactgctactaatccagctggctttacttcaaagcttactgtttacgcaattgtaatgggtcctactgaaaaggcaccacaagaatacgtaaaggctgataatactaaagtttacaacattaacggtaatgttgtttcagaagctgctaatattccagctcttgcaaagggcgcagctgtttacacattcggtaaggtaactgttaacggtgttgaatacactcgtatcaacaaggaaggctcaaacgaattcgttaagagttcagacttaactgctactaagccagatactactgttgctagccaaagcaagactattatgcacaacgccttctactacaacaaggacggcaagcatgttgatactgacaagaagttgactcgttacaactcagtaactgtttcacctaagaccactaccatcaacggcaaggcttactacgaattagttgaaaacggcaagctttcaggcaagttcatcaacgcagacaacattgatggtactgaacgtactttgaagcacaacgcatacgtttacaagacttcaaagaagcgtgctaataaggttgttcttaagaagggtgacaaggttgttacctacggtggctcttacaagttcaagaacggtaagcgatactacaagatcggtaacaacactgaaaagacttacgtaaaggcttcaaacttttaattaagtctgtggtatacgctgacaaataagaaaggcagagcgaaagctctgtctttttttggaggaaataataatgaaaaagaattttaaatttactagtattgtagcggcggctttgttcgctgcatcgcctgtagtttcattggtagctgccccaaatactattcaagcagctgcagttgtaactaaaagtagtgttgtcactcactatcttcgtgatagaagtgtatacacaaacagcactagaattagtgcttctacctcaattaataacatccatttgactaataatactggtactgaaattgaaacaaacgatgcagttttaaacaatggtaaatatactttaaatgcacaagtaacaataatgggtttgacgccaacttcaactgatcgttcagttactattgttaataacaatggtgaaattattggttctgctagtgttaatgcacacagtactcttgcacaaggtaatcttgaatttgattttgcggtcaagaatggtcgattaagtcatactagtttgggtaatattactggaaatactattaaagtaagcaagaagaaagttaccaagaagaaacataataaagtagctcataagaagaatcacaaaaaggcacataagaaaactgtcaaacatactaaaaagagaaaataatttaaaacgaggcaattgcctcgtttttcttttgctcttaaaaattaagctaatagttatcttagactacgactagagctaacgagttgcattcgttaacttttttatcattatgatacaggtgcaatataaaaatatttaaaccatttaaggttattcgagaggttttagttaatgcattgattcattatgattatcagattcaaggctctgaggtaaacttcaatatgttcgatgatcgaatgaaaattatattgcctgatagcatgattaacgagaatagaatttaggataataatttactctacgagaaggaacgaaataatctctgacatttttggtagactacacttcaggataagaagaggtcatttcaagataatataattaaaagatggaaaatagaaaaagccatttcagcaaaaatgtgactgaaatggcttttttactcttctaacaaccaatcaagcagtatttaacttgaataccatcaattgttccaacatcaaattatccatttttcaatttgagaaccataattagcatagatactgtttttttttataaaacataaaattgggggaactttttcttttgctctaaaaaggcatcgctgttgcgacacctttgaaagataattttactgtagattattgattactgtttactgataaacttcatgtactagtttgataatttcatcatggctaagcatatcgccgtaattgtttgtgagttcttgtaaggcagtgtctttagtaccacccattcgtttaatgactaggactagcttcttagcatcttctatttttactttcctagcgacttcattcatttcatattccaacttgtccatatcttcgacccactttccgctattcacgtaatggtcgacatccttttgcaagctggcgatgtaaccttcagggtgattgatgattccattcatgtaatccaagaagtcaattatcttttggttcaggtcatgattattgcccttagaattgaaaactttaacgtgcgtaccagtctgaaattcaattcttcttattgctcatgacgtgaccaaagaccaaatcgtcagtgcttctcggatatcgactttttattttaatcatattttacctcatttcaattattgcttcagcaaaattaccctctactacttattacgcaaaaagtaggtaaaattttttatgaaattaaattttgttacaaaatgaacttattgttccatcacattacgtaatttacctaaaagctgctttttcaatcgtttcaacgtaatacgcggtataccgcattctttaactagctgcgtaattgtctttttctcaagcaaatgctcaaaaagaattacttgctcaagttgacttagtttcttaatctcattctttaaagctacaagattatcccatgcctctgttttacctaagtcataagcctcgtcaattgcagtattgcgttcacatacgcgttgctctcggcgcagagcatcgattgtttgccaaagaacctttttgaagctaagcttatcaatctcactgcgaaccttttgcccatctaatttgcgcaacatctcggcatacaaaattacaccttcttgcaacagatcttcatagagatgatagtccggtcgaacatgtgccgcctttaaggcaccaccaactaacttacgatttttccatgcttcttcgaaatatttttgacttgtcattgtgacactctcctaaatgatgtcacaagcgcttgtgcactattagattagcaagattggatctgcaaaaaaacttagtggtgagatgctctaatcccaagtgtcgcatgtgtttgttaatttctacgataagcaaagtcaagtcagatagtacctgacgaagaacagatgatagtcaaaaaagtgcaaaaaaatacagctcatgagagctgttaacgattatatctgatcttaataatctgtttagtaaaaaagcggtgttcacggtgcaaataatctaatggcttaaattctttcacaatcgtaagtaggtgtaagttcaaaacatgattgtagaatttgtctgccagctttttaaaactatcaatagcgtacaagtccagttgcacataatagttagaattatgcaggattgaatcagaattaatggctgttacgcgaagattattttcttgcaacatatgctgataatataagtcagaataataatgattatgaaacagatactgaccaattatcttcgtaagattgggcttaggagaatcaaaagcaaaattataaaccaagccgttttcatcaagtgcaatactgttgaaaatagcttgatcatggcgtttgacgtggaagtctttaatccagtgcaagcaaatccagtccgtgaagaagtttccactaaatgcatgcattgaaaaataaagcacattgtacatgacaatcccttgatagatatcaactccagcctcgcgagctagcattctctgccaaatcatatcgcaatgtacggcatgccgcatcaatccttgcatcatggcatgtgttgacttctgactaagcacaattccacgattcaggtcgaaggctactgccttatatttgcctaagataggattttgcttgaactcatagactgccaatgtgttcttattgagtcgatatttattgtcatacttgatgtattgctctaattgcgagtcattctcaattctccgcttggtaaggtccttggaccaattacgatattttatgtcagtgggcaagctaataatccccaagttacgttgcttgtaggctgacacatccatcacactccctatgtttgaatatatctatattgtttcaaatattgaatagtattatacagtatgaagcattgattgtatagctagaaattattatgctgaaaaaaacaattttataaaaaattttgccgattttttgcgtaataaataatagagggtacattttatcctactattttttagaaagaggtgcgcaatgaaaaatacgcacaaacaaaaagaattatggtttggtttttcagaagataaggtttttggcgaaatcatgtccaatccagctttctgcaagcatgttttgcaaggaattctgccggagatcctaattaagaagatctttccgcctaagaagcaagaagtaatcatcgatcctgagcatcgggatcaaaaagatgtccgactcgatattttggttgaggatattaacggcaacctttacaatattgagatgcagcggtcagacgatgacgatattgcccgtcgcatgcgctattatgcttcgaaaaacgatcaaaggtatactctccaccagggctatacttacaataatttgaaaaatgtcttcattatttttctttgcacgttcaaaactaagcaaaaagttgcaatcaagtctacataccaaactattaatgtagacaatcatgcagatatattgcaggatggcttgactaaaattataattaattcaaacggagttcctgatggaaccgagactgaaacattacttaatttagtcaaactcatgaaagatttaccggtacatggcgataaactctttgataaggcacaaaaacgcatcgaatcaatgaatgccgatccagaatggagggacactattatggattttgaaactagaatgcttgaacgcgagcaagttggtgaaaagaaaggtcgtatggaaggcgagaagaaaggcagaaaagaaggcgaaaagaaaggcctacagcaaggccttaaaacaagtgcacttacattagtcgcttctttgaaagatgtaggctgcactagccaacaaattctgcaacaattaaagcaaaaatatggcaatgtgttctctgataaacagttagaagaatttctgaaacagagctaagttgtaacaacaatattttccaagatgtcgcataagcggcatcttttttagagccaaaacattaatttaaacgtaaatactgcaaacaaaccctgaatatagaaaaatatagaaaaatatgctaacatgtatatataaaagtgaaacgacttgcatgtgcgagagttaagacacaaaaaaatcgctactctaatcggacaaatgagtaacgattttttgtttcaccaaattttatagcattaaaactaaatgtattggctgaggctagtgacgcttgtgatgtcttttagagcccaatctataatttttacgccttttgctatgaccattgcctagccgcttgtcaaatagtctctctaagacataagaaactacgttcactaaaagtggcgctaagatagagcctaataaaaagtgaaacaaatctagcatgtgttcacctcccaatgcgagatctgatattggaaggcataaacgtcaacgtttattataacaaatggtttatagagttggatttaaaattagccagtacatggtgacaagctttttgataaggcacaaaaacgtattgaatcaatgaatgccgatccagaatggagggatactattatggacttggaaactagaatgcttgaacgcgagcaagttggtgaaaagaaaggccttaaaacaggtgcacttacattagtcgcttctttgaaagatgttggctgcactagccaacaaatcctgcaacaattaaagcaaaagtatggcaatgtgttctctgataaacagttagaagaatttctgaagcagagctaggttataacaataatattttccgagggtgtcgcaacaagcggtacctttttctagagcaaaaagaaaaacgaggcaaattgcctcgttttatcttatctactacatagacttaattaaaagtttgaagcctttacgtaagtcttttcagtgttgtcaccgatcttgtagtattgcttgccgttcttgaatgtgtaagtaccaccgtaagtaattacttcagtacccttcttcaaggtaaccttgttagcacgcttctttgaagtcttgtaaacgtatgcgttgtgcttcaaagtacgcttagtaccagtaatgttgtctgcgttgatgaacttgccagtagccttaccgttttcgattacttcgtagtaagccttaccgttgatagtagtagtgttcatagcaacagttactgacttgtaacgggtaagcttgtcagtaccaacacgcttagcgttcttgtcgtagaagtaagcgttgtgcataatagtcttgctttggcttggtacagtagtgtccttgccgttagcaacattaacggttacaggtaaagtagcgtcaacaccattaattgatgaagttacctttacattaactgagaatgaagttggagcagcaaaccaaccagcattgtcaactggaatattagcagcctttaaagcagcattaacatcagcaactacagccttttggtctggcatttgtgatacagccttaccatttgaaacttggtaagcagcaaagttctttaagatttcactagcaacagttgaaacgttcaaacgaccgttaacaccagcagttacattaactgaacccttagttacttgtgaaccgtttgaagcgttgtagaagttaataccgctagcatttgaaaggtcaagtgcattaacgtttgaaacttgaattgaaataggtttctttaaagtaccatcttggttaagttcaacttctttagtgttagcaaagctcttaccctcatcagttgagaacttaacattgctgttcttggagccaagagtgatagtcttgtttgcgttagcaataccaaagttgaatgatacaccctttacagtaacagtatataaaccattagcaagctgtgcaaaatgagtaactgtcctaccctttgaatcagtagcagcagcgttatcattcttagaagctaaagtaccagtgtatgattggccattgtaactagcagtaatgttaccagtaatgctaccgttaatagtttgtccatttacagtagaagctgcaatagcagtaaggttaggtgttacatcaacatcgtattttgcatcagctggagtgttgattgcggtaccatcagcattaattacagtgtatactgtgttggtagtggttgcagcagcgttaacagaaacagctgaagcagcaactggagcaacagctaataaagcagcagcagcagcgctaacaattcttaaatttttcttcatgtggtcttttcctccttgaaatataaaaaatgtaataggccataggttcagcatgtagggagcctataatgtacaaaattcttcaaagcaagatccatgagtttataactctcatgaggtagtagtcattgctgaaggatcagcatgcgtacaggcgacacgcctgaagcacgtatattgtgtactcgatttttttcaagcaatgaaagggtggtttctgtcctcttatttgcttggggtcggttgggtgggttttgtccgctgcgcagatacttttatgaaaaaagagtacgatgcgatttgatgatttagagtgtcatttttggttttgttaagggatgcttgtaaaataataaggtaaagaaaatctaaagaagtaattttgtgaaaaagaaatcgacattttttgcgtacttatatattgtcaaaattaagatatgtaggtgataactatgttaaataaaaaggataaaactaaaattcaagaattaactgataaaacagtggacttgatcgtagaaaatatggggaaatcgcgtaaagaagcggaacaagattttcaaaagtcagatacatatgcgttcttatggctagcgaagcgtaatatcgaaaatgcgcaccctattattttgtacagaatgtttaattctgagttaaaagctaaaccaatagacgaagaacaacaaagttttattgactttatgactgataacacaatcgagttaattacacagaatactaattttggaagataaaaggcaactaaagttttcaaatctacaaaggtatattggatactagttcactcaggacataatttagatgaatcttctcccgaagagctgtttgatatgtttagaaatgaacttagtataggtaatccactaccttcatctatgctgaagttaacttattaaaaaatttatataagttaaataatattattacaaatgttacttttttacaataaatctgttgaaacgcttgtctagacctaatttgatagatacaatggaggtgttatattaaggaggataattttttatgaagaagagacttttgaccagttttgctgctgccgcaatgcttacttctgtagctgtgccagcagtaaatactacgatgatgaatcaagcctcaagccaacgagtttctgccgctaccgctgatcaaactgcatttttaaacaaggctgccaagcaggcagttaaagcagctaaaaaatatggaactttgccatcagtgatgattgcccaggcaataactgagtcaggctggggaaagtcaggattagccgtgaatgctaataacctttttgggatgaaggctgatgattcttggacaggtgagacttatactgccaagactagagaagaagataaaaacggtaagagctactatattactgctaagtttagaaaatacccatcttttgaacaatcatttgaagataatgggagtaagttgagaaatggtgtttcttgggatccgttgcgttataagggcacttggattgaaaatgcatcaacttatgcagctgcaaccaaggctttgaccggtacgtatgctacagactctaagtatgataaggcattaaatagtcatattactagttctaatttgactaagtatgatccagtaaccgttaatactactagaacttatactgctggcaaggatagttcaacttataattggccaactgctccatctgttgccagtgctattggctctgttaaagctggtgaaaaagtagtagttaccaagactattactttccatgatggttcaagcagaatgtatattgatggtcgcggttgggttaatggctcagttttggacaagagcagttctgcaactaaggaaccagtaactcaggcacctaagaatgtgccagctgtttctaagaacttgatacataatgcctatgtttatgaccaaaatggtaagaagctaaagggcaagatgtacaagaccagtgatgaaaacggtggtaagtggatcaatacttatggtaccaagaccatcaagggtaagacctactaccgtgtcggtgaaaatgaatacattgcagctggtaatattgatggtagcctcagattcttgaagaagaatgcttatgtttacaatcaatatggcaatcgcgataacaatttgaagcacaagaagaatagccaaattgctacttacggcagtgctataactatcaatggtaagaaatactataaggtaggtattcgtcaatacgttaagaaatcgaacttcatgtaattaaggaaagggctttgttgtgaagatacgcaaatttttaattgccttaattgcgcttttggggttagtcggcgtatcatcggtcagtaaccaggtcaaagccgcttcgattaatactttagcgaagaaatatcaatatagtggtgtcacctatttatacaagatgctcaaactagaggggattaagtacaataaattccctggtgttgagtatcaaaatggcaagccagaaggaattgtcgttcatgagactgacgatcccggagctactgctcacgatgaagcaatctactttaaccgcgagtggaaaaatatcaacgcttacgtcaatgcttttgtagatagtaagcaagtcatccaaatgtattcacctaataatggtacttggggcgcaggactgaatgccaacaatcgctttattcaaattgagctttgtgaagaagatagtcgtgatgcctttgctaagtcagttaataatgatgcaatttatattgccaagttgcttcatcgttacaatttaaagccagacaatgcttgcgatgatggtgaaggcacaatttggtcacacaaggcggttagcaccttcttaggtggaacagaccacgttgaccctgatagttattttgccaagtgggattacgacatggatcagttttattctttgatcgagtattactatgacttgcaaaagaagaatgaaaatactgatactaaggatccaaataagattaaggacgaagtaccagcagaagttcaaggtgcggtaactttaggtcacgatgcttatgtttatgacaagaacggcaagaagaccaagatcttgaagttagctggtagtccggtaaccgttttaggctacaagataatcagtaataagaagtactatcaaattggaaagaacgaatacgtagtagctactaatattgatgctactgctagaactgttaagaagaatacatatttgcggactcgttcaggtcgaattgaaaaaggtaatttggtcaagaagggtagtcgggtcatgacatatggcagcaagattacaattaaaggtcaaaagtattatgctttaaatgctacacaatatgttttagttagcgatattaattagaaaaatacgtcttaaaccataaataatgggaattaagacgtattttttgtataattcttgtgttgaatgtgaaaagaggagaatttaatggcgcaattatcattatttttggtcgtcttattagcgctcgtaattccaatatttatggcgcgtttcaaaataagcactgtaccaacggcgattgctgaaattatcgtcggaattattgtaggttcgagcggatttaatatcgtggtttcgatacatgatttaacatttttatcgaacctcggcgtaattttgctgatgtttttatcaggaatggaaattaattttgacctgctacagcgcaagaataatcctaaggctaaatcacaggcgggaaaaactgtcgatccgttgccaacagctttaacagctttcgctggaattgtggtaatggcctttgttttggcatatgttttaaagctgatagggctatttagcaatgttatcttggcagcgattatttttatgaccattgcattgggtgtagttattgctaccttgaaggaaaaggatattcttggccgaccgattggtcagacaattttgttaactgcggttttgggcgaagtaataccgttgctcttattaacgatttatgcctcagttaatggagggaatgctggccagctttggttgattatcttactgtttatcgctgcgattattcttttgcggcggtttaagcaaccgtatttatggtttagcaaagtaactaaggcaacgactcaattggatattcggttagccttcttcttgatttttgctttagttactgtagctgagcgagttggtgctgaaaatattttgggagcattcttggccgggatggtaatgaaattattggaaccaagcgaggcaactaaagataagctaacttcaatcggttatgggttctttatcccaatcttttttattatgactggcgtgggcttgaatttaaagtcactatttgctcatccatcatcattgatgttgttgccagttttggtcattttcttgttcttagctaaagctcctgtagtttttctttatatgcgctattttgaaaagaaaaatgcctttgctggtggctttttaactgctactacaattacgattgttttgccaactctacaagttgctagaaaattgcatgcaattacttaaacacaatcagatgcctttatcttagctgcggttattgtttgtatcgtgagtccgattgtctttaattcaaactttgttttatcacctgaggatcggatgaaagaaactgttactattgtgggtgccaatacttttacggtaccagttgcacatgatttgcacgataattggtatacgatcaagatgtttaccgatcagcaggaccaatacgaaacttatgatagtagggttaaaggtttaacattacttgataatttggataatcaaagcttagagcgtagtggtgcctttgattgcgacattttcgtagctgcagggcatcatgatcaagaaaatgcacgaatggcggaatatgccaaagacttgggagtcaaacgagcaattgcccgaatgaatgaagtcgatagcgatacgatggctcgatgccaggaggcaggagtagagttgttcaactttactaatgtacgttctgctctgatgcgagctttgattgagtctccaacggtctacaagattatgactgatactaacaatgtgttgtactcagttaaggtgagaagtacttcctatactggacgaccacttagggatctggaatttgtggacaagattacggttagtcgaattcggcgtggtgatgagtggttaataccacacggttggactgttattgagccgaatgatatcttgatcttttctggagaatttaaggttgctgatcgagtaaagaagttacttagtcatcaaaattagagataaaaagaggctaaatgcaaaaatcctgcatttaacctcctttttacgtaattaatgattttgtccttcaactgcttcaatgtcgccttgtccatcgcgctcaacaatagccccaattgcagcgattaagcctttaacaatatcggctaatgccattgatggagtgcttggtcttttgacaacttgttctggcaaaaatgggatgtgaatgaagccagctttaaggctagggaattctttagctcgcatgtattgcacttgataaaagatgtggttgcagacgtaagtaccggcagtgttggaaactgtagcaggtagaccaacagcgcgaatcgccttagccattgccttgattggtagttgggtgaagtaagccgtgtcgccatcggcttggataggttcaccgagcggttgataaccatcattgtcggggatgcgaccatcgttaatattaatagctactcgttctggggttaaagcagcacgcccgccagcttgaccaacattaagtacataatctggtttttcttgcacgatggcatcatgaacaacttgggcagatttattgaaaaccgtaggaatttctaatttgataatttttgcacccttgattgagtcaggtagttttttgactgcttcaatggcggggttgatcttgtcgccaccaaaaggatcaaaaccagttactaaaattttcaatggcttttcctccaaatttaaatcatagaattttttgctttagtcaaaatttgcattgtctctaaagtattgacaaatgcttcatccgctttttgcgtatcgtgttgatcaatcatctgggcaaaagtattaaattcagctgccattcggtgcggatatttatttaaattataacgcttaggttgctcatttctcatttcaactgtgaaattatcaagtgttcccgttgagccgtcaaaatagatactacctttttcaccttcgataaaagaacgtggcgttacatagctatcttttgatgccgtgagggaggcttgtttgtcaggataagagaggtgaagaataccagaagtatcaacgcctttttgcatgttggcataatattgcacttgatcaggcaagccaaacaatgccgagacaagatgaatgttgtagatatttaaatccattaaagcaccgccatcttttttaggatcaaaaaccggcgcaattttgccttcaagaaaggcgtcatagcggctagaatattgcgtataatttaagttaacaatatgaattggtgcgatcttgttcaattctttttggatttgtttgaagttttctaaataaaggttagtaattgcttcaacgatgatcaaccccttttcgtcggctaacttttttaattcttttgcttgagtggtgctctgaacaaatggcttttcacagattacatttttatcgtgttctagagcagctttagcaatctcataatgcaagaagtttggcaccgctacataaactgtatcgacttcagaatcagccattaattcttcattgtccgtataagtacgtttgatgttgtactttttagctaattcccgggcaatattttcactgcgcttagttgaggaaatagccgttacagtcatattcgcaacttgatcagcggttgttaaaaagtcatggacgatcatgccgctgccaataattcctaatttcatttttttgcctacttctttttagtattagtggttggtaaatctttagcgttagttgcagagtctggtactcttaagaagtcatggctgccgaagttgccataactttgaccaactttaacgtacattaatttacctagtttcatattaacaaagacattaaaggtagataatttattacctttaattacagccttaacattcattgattggtacttgcctaattttttaatttggctgaaaattttagcttgatttgtactttgagcagtagtgtcaaaaattggtgctgctgcctttttcatcaaagcttggtcagtacttttagcagttaaagtataagtgtaaacaccatcttttttgctttttttcattttataagcagaaaccaacttatcacttggattggtgatcatgtggttattcatgatggcatcggttaagtcggcataattatgaccggttagtttttcaaggtcagccttgtaccaagtatcttgtccattaatgtagacattgttaaggttgacccattcctcagtagaactagttttacctttgctagtggtttgattggtgatgtggtaaacagtggttttaccaccaaaggtagtgttagctaaggcaacttgattagaagtgtcggtacccagagtaacagattgaataacctgtcccgacttgaagctacttttagctttttgtacaacttgagtcttagtcagagctgaagtagccttcttctcttgtttactgcagccacctaataaaaagaggacagcaaaggataaaccgataatcgttttcttaagtttcatttttttctcctctatgcttcaataagtctattataactaaaaagtccgttgctcgttggagttacggactattcttttactttattttgtattaattttgcctaaatctacggccgatttcttgatagaagcaggtaccgtcaactttttgacttgattaatttgatcaatctgcatggtgaaattctttttgtgtccttcatccttataagtagaagtcacattaacatttttgatgtcgtaattctgatctacgttaattttgatttcgttgctaattggtttaacatcatcaagatcgatgccgattaaagcagtaaaggcagaatcagatacaattgcgttccaaatttttttgttatttcctttataagtaagcagataatcattgccgttttgctttaccttaaaatattttgcgttagggatgaaaggcatgagtaatgtgccgttcaaattgtcggtaatggcaccataggcactagccttagacaactttgtcttaaaccaacgctgagaattggtacctttcatttggatatagttgcttttaccctcaatccacattttatagtgattagagctgctagaaacattagcataaataatcgttggctttttagtatattgggcttcggctttttgcaaagacttgccattgcttaattcattccaagtagcgtgcattgaactgaatttcgttttttctgcactggttaaaatcgtcttggcagtaggtaaattagctgtcttttttgaacctgtcttagagcaggccgttaaaaagagtaatgctaataaaacggtaatgataatattttgatgtttaaatttcatacataactttctttcattaaattttttcttctagtatagcaagaataacgttacaaaattgaaaaaacacgatttttttagtcttaactctatgaaaaaatttgtgaaatgtgtaaaatatggatgaaacattgaattttaaaaggagatatttcatgtcaaaattagttttaatccgtcacggtcaaagtgaatggaacctttcaaaccaatttactggttgggttgacgttaacctttcagaaaaaggtgttgaagaagctaagaaggctggccgtttaatcaaggaacacggtcttgaatttgaccaagcttacacttcattattaactcgtgctatcaagactttgcactttgcacttgaagaaagtggccaactttggattccagaaactaagacctggagacttaacgaacgtcactacggtgctttacaaggtttgaacaagaaggctactgctgaaaagtacggcgatgaacaagttcacatttggcgtcgttcatacgatgttttgccaccagctattgatgatgacaacgaattcagtcaagcacatgaccgtcgttacgcaaacttggacccacacatcgttcctaaggctgaaaacttacacgtatgtcttgatcgtgtaatgccattctgggaagaccacattgctccagatttacttgacggcaagaacgtaattatcgcagctcacggtaactcacttcgtgctttgactaagtacatcgaaaacatttctgatgaagacattatgaacttggaaatgaagaccggtgaaccagttgtttacacattcgacgaaaacttggatgttgttaacaaggaaaagttggacgactaatttattaagtagttattcacacaaatagaacttcggcgtaagtcggagtttttttatacaccaaaaaaggcatcaccgttaagggatgccttctttgtatcaacttgctccaaaaactataattatttctttgatttcataatttttttggaacaacttcattatattataaataaagaaagatcgccatttttttctaagaaagtggtgaaaattgacagttgtatatgataagtgctattttgagttacaggagtgtagaaattgggagaaaaatatgcaaacaatcgataattctctctttcaagtctctgtcgatgagaatggggcccggatggcacatctggtgtctttaacagatcaatttgattatctcggcgagcaagaaagtgaagaaggtatggcacttgcttttccagtaatggatcaagccgataatttggctaacaagttgccttggaccgttgttgacaaaggtgatactcgcgtaagtctaactttaattgatacgccggagagctataagagttttccatatcattttgaagtaatgactacttatgctttggagggtaatcaagtcaatatatccttttatttaaaaaattcttcaaataaggaactgccattttctttgggctttatcttaccaacttcttggcaaagtgaaagccaggtcaataagattagtttgactggcaaagaacatggcattgatcttacttcaactgattttaagttgagtgcaaaagaaggaagcgttacagcttttacggataaaattgaattagaggcaaaaagtagccgtaattttgcgttaagcttgactttgaagtaaaaattagtaacgattttaataagatatactaagcaagtcagcgatgatttgctttttttgttataatacattcaatgtgaatttacatcataataggtatattttatgaaagatagaaaacaaagatctaatcacccgcataatagtcgggtagacacacacagttataaaaatcgtcatatttgggtctgggttattagtatcgtagccttgcttgcggttgctggagcggcgtactttgcatcagtttatttccgtactaagtcagcggttgataagacctatgatcctaagactgcagtgaaaactacaggtgaatttgatggaaagaagaagttcgctgttttactgatggggactgatacaggtgcccttgatcgaactgaaaagcgcggccggactgataccatgattttagctgtagttaaccctgctaagaagcgttacacattggtctcaataccgcgtgatacgatggcacagatggttggaagcgagagcttcaagacagaaaagattaacgccgcttatgaattaggcggggctaggatgtcaatggattcagtttctaagttaatcaatgtgccaatcaagtattatgccgtggttaacatgggtggaatcatgaagatgattcgctatgttggcggaattaatattagaccaacgcttagctttgaatatggcggttatatttttaaaaagggcaagctgacccatatgggtggtgcaggtgcgctagcatattctagaatgcgttatgatgatccacgtggagattatggtcgtcaagaacgacaacgacaggtaattaccactttgatcaagaaggcagtttcaattagttcattatcaaatctggattcaattttgacttctgtgtcaagcaatgttcggactaacttgccatttagtgcgatgcaacagattgcgatgaattatcgtagttgtgccaattcgtcatctagtgattatctacatggttacaatgcaatgatcgacgatgcggcttatcaagtacagccaactagtgaattgcaacggatttctaacctggtgcgcaaagaattaggtttacctaaggaaatgatttcaaataatgaaactttccaaaacgaaaagaatattgcaaatggctttagctttaagagcgaaaaaacgcagcactatcatatctatgattacaccgaagaaggtgataattaatggcgcgcatttgggctactctgatttgctacgtttttggaaatttcttaacggcgatgatcgttggcaaaatctttttaaaaataaatcctactgaatacggttcacataatccaggaacggctaacatgggtgctgtttttggtaaaaaatggggtattttaacctgtttaggcgatttgcttaaaagtttaattgccttgtttattgtatattttgcttttccagctcatattaatattgcttatacagggctaggcctgatcttaggacattgttttccaatctgggatcattttcgaggtggcaaaggagttgcggttgcagctcaggtagcagttttttataattggaaagctggctttgctactttattagtggctttggtattaacagcaattatgcaaaatttgacgattccgcctttagtgtttatgcttttattcagtataaatacattcttgcataatcaagaagcaggatttgtttttatcgtgattactttgatcatgtgctttaagttctggcatgatatcgtagactttttcaccggtcatggcaaaaaggttgatattctgctttcaattaaaaagaagctagggatcattaagtaatgacagaaatttttagtgaggacacagactagagaaaatgagtgagattaacaagaaaaaatcactaaatgctcttcaaatcatttgtttgattgtcgtagcattctttatgctagtgcagatgtattcttggggtagcacttttggtagattaccattaagtaccctaatgagatttattccaggactacttggtcacagtacgatggtactagtaccaatggtctttggtgctgtttatagcaaaagaaaggttcatccaactgaagcctttaagttttggattatagcggttgttacactagtgcttttatacttggtgaacttctttaaacgaccaggtacctttaatatgtggaagctctggggagtatttttcccagttttgactagtacatcagtattgttggctggcttgatttttagtatgctagttcaaccatacttgtatgaattacaacatcgcattactactaagcaaaatgtattattgcttagcgcattaactttgactggttttgcgactagtgcaggtacaatgatctttaacaagtcaatttatggcatttatttgatcttgtactttgcttgggggatgtttttagctaacgttaaaattcctaaaaaggtctttggctggtcaattgcagctggagtaatgtctttcttcgtaatgtttatcggtattcccggatttaatggggtttactggtaccaacgattatctggtcgaagtggcgtttattcctggaatcctaaatttttaagtaatattgcttcaccatttttgttcttaatggttttagcagccttcttaatctttagaaaagtgattgttagctatagtgctaagcagatgcacttctttattccagtaattatttttatggacgctccaattattggtggttttgttaaatcgttccgctttaccaatagcgctggatttaacaagttcttgatgattgtcatcatgatgctagctgcctggggcttaagctggctatatgagcgctatttattcaaggtgaagccggttaaacggacggttgcttttttcaagcaacataataacttagcagaaattgttgaagatgcttggactaacttcactgcttggatagttgaaaatcgagtacgactacttacatggggctggttctatgtattaagttttgcttcattcttaattgaatcagataatctgcggatccaaattacgactgcaactgatatcaatgccgtaattttcttgctcgggactagattcttcgctattattttgacagcaatcttccttgatgcaatgtttgcaattttctacttcattactacgcgttactggacttcaacagttttagtaactgtaattacaattggttgggctattgccaacaagattaaattagatcttcgtggggaaccaatttatccaactgaattagacgaaattgttaactggaagaccttgatgccaatggtcggccaacaaaagataattatgatcgctattgccttagtaattatcattgcattgactgtctttcttgcaattaagtttccaattaagaaaaagggctcatggaaacgccgtggtatttgggcattgttgagtttgcttttgttcatgacaccagtgcgctttaaccacgatggcggaattatttatcacattaaccgtggctttgataataagcaatcgtttagaaaccctgaacgtgatattcaaattaacggtccattattgaacttcttgaattactttgacctgcagattatgaataagccaactaactattcaaaatctacaattcaacatttgaatgagaagtacagcaagatcgctaatgaaattaacaaaacaagaaagaatactctaaagaatcaaactattgtttacaacttgagtgaaagttttgttgatccatatactttcccaactgtaaagatcgatcctaaggtgccaaatccagttaaatttattcaatcaatggctaagagatctacttacggtagcatgcttagtgcaggttatggtggtggtactgccaacatggaatgggaaactttgaccggtttcaacatgggaatgttcaagtcaaccttgacgccatatgttcaaattgtgccaaaccatgatttctatccaacggtcggaatggacttcaattataagtctgcagttcacccattcattggtacttactactcaagagtagaagactataagagatttaagtttaataagtttgtttaccttggctctaaatataagatcattgatcaaaagaaacttggtaaatcaacttataattctgattacactacttatgcaaatggtttgaaacaaatcaatagcatgaagggtggtcaattcattaatttgatttcaattcagaaccacatgccttacaacaattggtatccaaacaatgaatacatgggcaaggtatctggtgaactcttcaacactgctgctattcgtgaacaaatggcaacttacatgaagggtgttcaatacactgataaggctgtaaagcaatttatcggtaagattgataagatcaagaagccaatcacagttgtcttctatggggaccactacccaagtatcttgtcacaaaactacgctagtcgttatccagtgcaaatgcactcaactcgctacttcatttattctaacaagtatgctagagaacatggtgctaagagcaagttgactcacaactctaattacgtcaacactagtgactttactgcaatgatgcttgaacaaactaattctaaggtaactccttaccaagcattgttaacagaagttcacaagaagttgccagcaatcacgattaacttcaatggtgatcaaggcttccaattagttgaccaaaaggggcacttcgttgatccaaagaaattgacttcagaacaacaagcaattttgaaggattacgaaatggtgcaatatgatatgactgctggtcaagcttatggcttaaaagctaagggcttttacaagatcggtgactaaataaaagagatcgaacgtaaagttcggtcttttttctacgtaaagtcaagcgcaataaggtgtttggctttattttttacctaaattttgtcatgagtatcttttagtggcgatttatttttttagaaagcatactaaataagcccacctctatatttaatttatgggcttagcgttataatgtacttgatcaattaattacaactaaagtctttttggttatgtgtggctacgttgtaatcatatagttgatcattgataatcagagcataaatggttctgattagtttatgaattgaagcaatagctatctttttgaaccctttggtttgagaggatagctttttgctttcataataatctgctatatgacacggatttgtcttagctgcattatcaatttgtccaatagctcgataaagcaacttacgtgcgactgcattgccatgtttagtaatacttaaattagagtccatttctcctgactgatatctgcctggatcaattccgataaaagcattgattttattaggattactaaatctgcgtaaatctcctaactctgctaaaactctgacagcagtggtctgtgcaaagcctggaatgctttctaggttttctaaatcatgattaggcaaagacttcgctaacttaaccattcttgcgattaaattttctctttgatcacttaaattaagcaatctgtgtgcataatactgcacttgctcgacttctatgctagagcaagatacaactggataagcttgataagctaattcaattaatttatctgcagtccttagagcgtgtttaaaagcaatcccctttaagctcattaaccagttaataagctgttttttatcttctcttcttactaagtcacaatgaggatatcgcacaactatttgccagtaatttttacctttagcagaagaaaatagattttcaatttcaggaaaagtcgattgtagagcttggtgaagtcgatttttagccattactaagtcagctgttaactggtcatagaagcggctcaaagcattaagctgcttataagtttgagattgaagttgattaattggatgatgatatagtctttgaattaaggctaaatgataagcatcagttttatcagtcttattatgacgtagtcccatatccatttcttttttagctttaagaggattaagaattacataatcatagccatagtcttccagaaaagattgcagtgtacgtgaataaacaccggtagcttcaaaaataatttgcggatgtttagaaaaagcggttaattcatgaagcaattgaataaaaccaggacgattattagtaatggttagttcatttttgctttcaccaattagttcacaaacagtagaagtagacttgcttacatcaattccaaaagtaacttgcataataaaaacctccaaaacttagtagtaaaacgtatttacttaagaaatcagatctaattttctaaactcgacatctagtgtccacattcttcgaagagactattgaaaacttaagtaaaactgccagttttgtatacgacatcaagtgtctaaagacctcagggcatatcgttttactactactttaattctacaaaagaataaaaatagtgaatcaattatcccgtcggataactaattcactatttagcttagaatgttttgtatccaatgataaaataagggctaagaggaataactgataattagctgatttaaaggtgattagaatgaaaaagataataacaatggcactagccagtgctgcactatttggatcttctgcaacaactgttcaagctgggacatataatcctaagaacattaccagttttaatattaataggcgtaactatgtagctaagggaaagatttataaactccatttacccgcagctggtagattagttactaatggcaatgttactttaaaaaatagtatggaatggacctgtattccttatggtaaggacaaaaatacgtattatctgcgtaaaggcacatattatttacgcgtggtgctagttaaatcgttttagttaataaaaaagtccaatcggattagactcaagttgtaagtaaattaaatagaaaagagtctgatctaattgaactacctcaagcttaatcgtttctctcaccatttacaagttagttttagtcgtttaaatgtaatttgtcgttcactatataatctttatgcgcctgataagcttacgcatcgaaaaaacattgatcaaacaaagctttccgacagctccatcttagcgatgctcatttggcaaactgaaattggaattgaatcccaaagaagattctgtaaattttttgttggcttatctcattctcgctttaatcgtcgagccaagatgcttttgcctttaattcgctgcatccgtcaagcttggaatcaagaggtaaaggttgctggagaatttttaattattgacagttttcctgttccagtttgtcagcctgttcgtaattatcgtgttaagatcttccgtgacatagccgatattggctataaagcaaccaagaaagtctattattatggtttcaaggtgcacgcgctagtaagcgatgaaggctatttgcttgactacgcagtcactaaagcatcagtgcatgatgccaaagaaacgacagaattgatgattaatgctcatccaattaaccattatcttttaggcgatgaaggctacttaggaaaagacttagctgccgagttaaaaggtatgggctatgtcctttggacaccatatcgaaaaaacatgaaaggtgctaaaaaacataataatcatcaactgatggcaattagaagaacaattgaaagcgacttttctttgctcagttactataacgctgaaaataaccgagcaaggagcttagctggctttcagcagcggctagaaatagccattttagcttataatatggcatattgcctagaacgatttaactagcaccacgcgtattatttaactagttcaaagaatattagtgtgaagactacttatactcgtttaactaagatccgtaagaatttagaaacttacgttgaaacaaagaagaataatgacaacagtagtcttaaagctagaaagattgaaattggtcaagatattaaagcaatgggtgaaatgtacgattacgatagtgtcgactactacacatttactattgactcacctcaaatggttacgatgaggatgatcaataatccgatttatcagcttggaaaaggtaacattttcagcaagatgaatgtaatcatgttcagtgaaaataatccagttggcggtagtacgatgctttacccagagagtttcgaaattaatggcaataagattgctagtcaaagctggtacttgtctaaaggaaattatacttttagtgtaaatactcgtggactttataattttcaattaacggctgttcctgatacgcgtgtggtaccggcagatactgagatagaatctttacaaaacactaaggatggtatggttgctaacttaagggatgcacgtcatgcgaagacttatgaacttgcatggcgtgaaaaaggctcaaaggcagctccattcacttctagtagcaatactacagaagtaagtactgcacctgctacacgttacatagacaaaaatgatcgtaaaatcccagtttcaattggtaaaaaattagttaatggtcaaagctactattttgtagctcgcggtgtaagcaatcctgattacattcgttacggcaatccggaaaaagataattattttggtgcttggagtaattcagtagaacacacttactatgcaccttcagatgcaacaccaggtgcagttgatttaaccactgctaaagctgacagtacttatcacaacattcatgtggcttggaataaaattgctagtgcacaaagttatcgcattgcctaccgccaaaaaggtacaaataagtggtactatgaagtaactgatcaggctactaacgcgattactggtattactagaaatagaaattatgaagtgaaattgcaagcattgaatggtgaaaaaactggtccatggtccgcaattaaaacaatttttgtaaaatagcggttgactaaaactatttttctcgttaatatcataactaacaaatgagtagcgagtcggctcagcgttcagagaactagcggttggtgtgagctagacaggccgattttagcgaagtacttaatagggttgctcctttaccggcttgaataaggcgcagcagcgcaaacgtgggtggtaccacggctaataatgtaatttagtcgtcccttggtcttttgaccaggggacgttttttattggaggaaaaactatggcaaaatttgatattttggaagatttaaaatggcgtggtgccattaatcaagaaactgatgaggaaggtttgagaaagtacttagcagaacatgacgattgggcattgtactgtggtactgacccaactggtgattcccttcatattggacaccttattccattcatgatcttgaagagattccaaatggcgggctaccatccagtaattttaattggtggtgttactggtgcgattggtgacccatcaggccgtaagactgaacgtactttacaaactgcggaacaagttaagcacaatgaagaaagcttaactaatcaaatgaagaagttatttggtactgaaaattttgaaattagaaacaatgctgaatggctaagcaagcttaacttgatcgacttcttgcgtgattatggcaagttattccaagttaacaatatgattaacaaggatgttgtagctagccgtcttgaaaatggtatttcatttactgaatttacttatcaaattttgcaagcaattgatttctaccacttgaataaagatgatggtgttcaacttcaaattggtggtagtgatcaatggggtaacattactgctggtattgatttaatccataagcttgaaggcgcagatcgtccagcctttggtttaactattccattgatgcttaaggctgatggtactaagtttggtaaatctgctggtggtgctgtttggcttgatccagaaaagactagtccttatgaattttaccaattctggattaatcaagatgaccgtgatgtggttaaatacttgaagtacttcactttccttagccgtgaagaaatcgaagatttagctgaaaagactgagaaagaaccttggaaacgtgctgcacaaaagaagctggctgaagaagttaccaagtttgttcatggcgaagcaggtcttgaagaagctaaaatgattactgatgccttgttctcgggcaatatcaagaacttatcagttgctcaaattgaacaaggcttgaagaatgctccaagtgcggaagctggcaatgaaaagaagaatattgttgatttcttagttgacactaagattgaaccttctaaacgtcaagctcgtgaagatgtaaagaatggtgccatttatgttaatggcgatcgtgagcaaagtactgatttcgaagttgatccatcaagtgactttgatggtaagtacgttattattcgtaaaggaaagagaaagtatactttagttacaattaaataattaaatatatgattttaacattttatatataaaaatagagggattttttcctctatttttttagctaataatcggagatatttactaccaactaatatttgtaaaagataaagataatgatttgtgtaaaataatattttacttcttaaattgttattttattttctaaaatcaattgctacaatctatttattaagttattcacaaattcacattattactatacaatttgttatttcaagtgtaataccaatataaaatagctgcgtataccttttgcaaatgctgatgcaaagcactctattaaaaactgactcttaataaaaatatgtgaaaagcagcactatctgctttacttctaatcaaacagtgttatagtaatagtgtaaagagaaagtaagtaaatagaaagaggttattaaaatgttagaatctaagaaagctattaagattatttcaagtttggtaatcggtttgagtttaggctgtgttcttactcctattgctcaagctacttcatttactgctcctaaattgggtactgcaacacaagctccaaccaatcctgctattaaaaagggtgataagatctttgttgttattaaagacaccaaaaatcaaaaagtagctgtttacaataaaaatgctgaaaaaactagcaaaaaagttgcaatgggttctacttataccgcaaaagacgttaagaaggttaataaaaagaagattgttagaatcaacaagagtcaatggttgaatactataaataaggacgaggatgttcaaatgaatgtcttcgccttttttggtataatgaagacgccgctttagctcaataggtagagcaccgccgtggtaaggaggaggtccccagttcaaacctgggaagcggcttagttgttgtttttggcaagaaaggaaaaattttatgaagcatgaacttacaatgaatgaaattgctaaatttcaaaaagaatatgagcaaaaaccacaaaatcgggttgcggaattggctgttgttaataatggtgtggctaaggctagtttggattcagaaaaggttaggaaattgaaccgcactttttcaattgaaatcccaactgataatgttactgatcaaaagcaatcgggtcgctgctggctatttgcggccttgaatacattgcgtcatggttttgctaagaagtataatgctaaaaactttactttttcacaaaattatttattcttctgggatcgaattgaacgagcaaatattttctttgataatattttgaataccgcagatcgtccacttagtgacagaacagtgcatacttatatgcagggacctgatactgatggtggccaatgggctatggctgtttctttgattaggaagtacggcttagtgccaacctatgctcaagatgaaagtttcactgccaacaatactgctttcttcaatcgtattttgaataataagttgcgagaagatggacttgtgttgcgtaagttagctcaagcaggtaaaaatgatgaaattgaagctaaacgtcaagaatttttgagtgaggtttaccgtatggcagtaattgctttcggtcaaccagtacaaaaatttgaccttgagtttaaggatgatgaaggtaagtatcattttgatggtgatcttactccacttgatttctttcacgactactttactgatgacttggatgactatattgttttgttcaatgcaccagatcatgaatttgataagctgtatgctttgccatttgaagacaatgtagagggcggaagtccagttcatttcttaaacactaaaattgaaaatcttaaagaagctgcgattaagcaacttgaagcaggcgaaactttttggtttggttgtgatgtaggtaaagatagcgatcgtcaaaagggaattttagctcataacctctatcaaactgatgctatttttaatattgaaactaagttaagcaaaaaagagagactggaaactggtgcttcgggttcaactcatgccatgacgatggttggtgtggatgttgttaatggaaagccacgtcaatggaaaattgaaaactcatggggaaacaaggtcggtgaaaaaggctactttgtgatggatgataactggtttgatgaatatctcttcaaagtagttgttaaaaaacaatatgtaccggaaaaactggttaagatttgggaaggcaaagcaacgccggtaaaagcatgggactcaatggcataatggaaattaaacaagttatcgattttactcaaacacacttaaagaatgaaaaaacgggtcatgatttttatcatggcgaacgtgtagctaatttggctagtcaaatgtatttagcagatcatgctgatgctcatgaagatagccgggtagttgctattattaaaacagcgggttatttgcatgacacgattgatgaaaaaatatgtgctgacccacaaaaggtaattgatgaaattaaagttttattgccgcaagtagggtttaatgaactggaggcatgggatattttattcaccattcaacacatgtcattttcagctaatattgagcatcactatcatttgcctttatctggacaatatgtgcaagatgctgatcgtctagaaagtttgggtgcgattggaattgcccgtgcctttacgtatggtggtaaacatggcaataagatttacgatccagagattaagccagccgttttaactagtcatgatcaatatcgtaaccatgtcgaaaccacaatcaaccacttttatgagaaactttttcatttagaagatttaatgaatactcctgctgccaaaaaagaagcggaaagacgaactgcatacatgcgcgactttgtacgtgaatttatgcaagaatggaatgtttagaataatttaattttgaataagccttgatacatcagcattgaggcttattttttaaataaattaaaaataatattaaaaaaaacttgcaaagcaaaaaatatttagctatacttataaacaacttaaagagttctattaattttctcataaacgaggggagcaataatatgaagtttaccaagttattcgctgcaggagcaaccgttttgattgctggctcaacattagcagcatgtggtagtaattctaattcgtcaagttcatcagctaagaaaacaattaattggatggattcggctgaaattccaacgatggacatttctaaggcaacagacgttaccagttttaaccaattgggtaacgttgaagaaggtttataccgtttaggtaagaattctaaagttgagaatgctttggcaacagataccaaggtgtcaaaagatggtaagacctggactttcaccttgcgtgattctaagtggtctaatggtgataagttaacggctaaagactttgtttactcatggcgcagaaccgttaatccaaagacggcttcacaatatgcttacctcttcgaaggaattcataatgccactcagatttctgcaggtaaggcaccagttaatagtttgggagtaaaggctgaaggtgataataagttagttgttaccttagacaaacgaattccatactttaaattattgatgggattcccattgttcttcccacaaaaccaaaaggtggttgaagctaatggctctaagtatggtacttcatctaagactacagccttcaacggaccttttgtacaaaagggctggactggttctaacctttcttggaagcttgtgaaaaacaagaattactgggacaagaagaatgttaagcttgatgctattaattacagcgtgcaaaagacaccatcaacagcttacaacttgtaccaatcaaataagcttgatgctactattttagattcacaacaaactaagaacttaaaacatcaaaagggttacactttgcgtgatactgcagcaaccttctatttgcaatttaaccaaaagaagaagattttcaaaaatgccgacttgcgtagagcaatctcaatgtcaatcaatagaaaggcactgggaagtgctttaggtggcgctaataccccagcaaccagtttaacttcaaagggtgtagttaaccatgatggtaaggactggtcagaagttgttggtgataagaagaacgccgcatataacccaactgaagctaagaaactttacaagaaggctttgaaggaattaggcgttaagaacgtttcatttacaatcctgtctgatgatactgattcaggtcaaaagacgactgaaacacttcaaagtcaattagaagaaaacttgaagggcatgaaggtttcagtagctaacgtaccattcaagactcgtttgaaccgttcaactagtggtaacttcgatgttgttgtttcaggttggtcagctgactttgccgatccaatttcattcgttgacttgtttactagcaagaatgcacaaaataacggtaagtggagtaactcccaatacgacaagttgatcgctgattctaagactacagcagatacaactaagcgttgggatgaccttgaaaaagcagaaaagatcttgcttagcgatgaaggaatcgccccactttactacaagactgaagcttggttagttcgtccagacattaagggcattgtctacaatggcgctggcttaaactacaacttcaagaatacttatgtagcaaattaattaaaaaatcaggaggacatagtaatgattattatttcagcaattattattttacaaacaagacataaaaataatctctcttcacttgtaattgcgtaataatagtctagctatgatttgatgaatagatagaaggagcaaccatgtgaaggttgctcctttttgtaataaaaaagaatgagggtcaaaatgaaaaagtggaaaaagtattttagtgcaagtttattaaccgtcgtatcagctgcaactttggcagcctgttcaaataaaagttcgtcatctggtaccaagcaaaccttgaattggatgactaaatcagaattacaaactttagatttgtccaaggtgactgatgcaactagtttagatcaaattaataattcgatggaaggactctatcgtttaggtaaaaattccaaggtggaaaatgctttggcaactaagactgaggtatcaaaggatggtaaagtgtggcattttactttgagaaagaatgccaaatggtctaatggtgatccagttactgctaaagatttcgtctattcatggcgtaggactgttgatccaaagactgcctcacaatatgcttatcttttctcaggagtaaagaatgcggatgatgtagtagcaggaaagaagaaggttgaaacactcggtgttaaagcagatgataaccaacatttaaccgttactttggatagaagaattccatactttaagctattgatgggcttcggggttttcttccctcaaaatgaacatgccgttgaaaagtatggcaaaaattatggtacctcatctaaaacaatggtttataacggaccatttgtatcaaaaggctggaccggttcaaacttgtcttggaagctagttaaaaataaagattactgggacaaaggcaaggtaaaactaagtaagattaattacagcgtgcaaaagacaccatcaactgactataacttgtatcaatctggaaaattagatgtagcattattggcaccacaagctacaaaacaattgaagaaccagagtggttatacaattagaccagcttcttcaacacaatatttacaattaaacgaaaagaacaagcttttccaaaatactgacttccgccgagcattatcgttatcggttaatcgtaaggcattagcttcagctgtaggtggtgctaacaagccagtcactaccttttcaccaaatagtatgactgaagtaaatggcaaagattatactgaattagtcaaaactgctgaaactgataagttaatgacatataaccctactttagctaaaagttattggaagaaagcacaaaaggctttaggacagagcaaagttaacttcactttgctaacctatgacgatgatgatgccaaaaaagcaggtgaatacttgcaaagtactattgagtcaaacttgaaaggcgttaatgtcagagtaaatagtttacctaaaaagactgccttagttcgtggtcaaaatggtaactttgatgctttactgatgggttggcaagctgactttactgatccaatctcattccttgacttgaacacctcaaatgcttcatacaactggggcaagtgggctaataaggaatatgataagtatgtagcagcttctaaaactactggaaacgaaaatactcgttttgaagacttagctaaggctgaacgtgtattgttaactgagcaaggtgtagtaccactttaccagccagcagaagcttggatggttcgtccaactgtcaagggcgttgtatataatggtgctggagctaactataacttcaaatatgcttatgttgaaaagtagactaaaatcctaaatatctaaataatagaacttataacaataaacaactcctctatgtaattaaaaagcagaccgaaaaaatccaatgtcattaagttaagacattgacaattaagggtgcttttttagagatcgaatcatttggattcgatctctttttttgtataaaataaaggcgaaaagaccagccttttcgcctatcttatatattatatattttaaaccttcaaaattattgccagaaagatggtgttaattatgaaagcccttcataagaatattctagaacgtcttgatcaaattatcaataatactggggatcatattcacgattttattaataatcctcatgcttttaccaggaaacgcactttagatgcagcgacagtccttaaaactacaattaacatgcaaggtcagaatttaaacagtgaactctttagagcttttggcgaagatgcaactaaaaagaacgataaagtagttagtacttctgcctatgttcaacgcaaaagccagctttctcctgcttgttttaaacatattctgactgtttttaatcaaaatctatttaatattcaactttttgatcatcactaccgtttgtttgccattgatggctctgactttaatcaaatctggaatccgaaatcgaataacattgtacaagcttcttctcataaaaagaaaccctattgtcaaattcacgttaatgccttatatgatctattgaataatacctaccaggattgtatttttcagcctaaatcagaaatggatgaacgcaaagcggctgttcaaatgcttaaagctttgaattgtggtccatatattgtaacaatggatcgtggctacactagtttcaatatgattgaaaactgcaatcgcctgcctaactgtcattacataatacgaactaaggctggacaaggcggagttaaagaaataacgacattgcctgatcaagaatgtgatcgtgagatttcctgcctggtaactacttctaactattactacatcacgcataaagccagtgagaatattcaccatgtccagcatcattatcgccaatatattaagtatcgctctaaaaatacccaggatctaagctgggattttggcgagttatgcacaataaaatttcgagcctgcaaatttagaattaatgatgccaaatcaggcaaagaagaatgggaagttgtgctaaccaatcttgatcgaaaaaattatccgctaaaaagaattaaagagctttatcatctgcgttggggtattgagacctccttcaagaaattgaagtattctttaggcagtgtacagttccattccaaacaagataaatttattgaaatggaaatttatgcccatatgattatgtttaatgcaatcagtcaaattgatgcacaggcctatattccgcaaaagcattgcaagtatcaatatgccatcaatttcaagcaatcatgcttgattattcagagcatgtatttggcttcttctttaacgcaagattttgaacggatccttattcagatcagctattataccattccaattagaccaggccgcaaggacaagagaaatattaagcccaaatcagctgtatattatttatatcgcgtagcttaaaaaagcagaatctgtgctatgccttatttgttgtacgaaaaaagcaccaatttaaccaattaaatgttaaatcagtgctttaaaagtctaatattaattgtcaatgtcttaacttaatgacattggaaaaaatcggtctgctttttgattttcgcttgaaaaaagcaagttaggctagtaaagtaaaactaataattttttgaatgagaaaaggagagcttaaatgtcaaattgggatacaaaattcgctaaaaaaggtttaacgtttgatgatgttttattaattccagcagaaagtcatgttttgccaaacgaagttgatttgagtacgactttggcggataacattaaattaaatattccattgatcagtgcagggatggatactgtaactgaaggtgcaatggcaattgcaatggctctccaaggtgggctaggcgttgtgcacaagaatatgtcaattcaagcgcaagctggtgaagtagccaacgtaaagagcgtagttgtgccaactagtgctgcaaaggccgcaactgatgatcaaaaccatctgctctgtgctgcagcagttggtgtaaccagtgatacttttgaaagagcagaagcattgcttgaagctggtgctgatgcgatcgttatcgatactgctcatggtcactcagctggggtattgcgcaagatcaaagaaatccgcgatcattttccagaagcaactttgattgctggtaatgttgcgactggggatgcaactagagcactgtttgatgctggtgttgatgtcgtcaaagttggtattggccctggatcaatttgtactactagagttgttgctggtgttggtgtgccacaaatcacggctatttatgatgctgctacagctgcacgtgaatatcacaagccaatcattgcagatggtggaattaaatattcaggtgatgttgttaaagctttagcagcgggtggcaatgctgtcatgcttggctcaatgctatcaggtactactgaagcacctggcgaaatttttgaagataatggcaagaagtataagcgctatcgcggaatggggtctgttggtgcgatggcccaagcacacggttcaagtgaccgttacttccaaggtggcgtaaacgaagctaataaacttgttccagaaggtgttgaagctcgagtagaatataagggcgatgtttctgatgtagtctttcaaattgatggtggtctccgttcaggtatgggatattgtggtgctgcaaatattccggaattaattgataaagctcaatttgttcaaatcactaatgcaggtttacgtgaatcacatccacatgatgttcaaatgaccaaagctgctccaaactatacaaaatagatataataaaagttaaaaataagagagaaagcaaaatttctctcttattttttaattttttggacattttaactagatatatttatttcttttggtataattaaaacaacattaaaaagtaaatgaaagcataaaataaaatgagggagcaattaatatggctagatacctattaaaacgtatattttatatgatcctcactttgcttatcgtggctacggtaacttttttcttaatgaaattgatgccgggttcaccttatgctaatgaagcaaagatgacgctaactcagcggcaaattatggatcaacagtatggtttaaataaacctatctggcaacaatatttgatttatattgcggggatgcttcacggtgattttgggacatccttccaatatagtaaccaaccggtagcttcattaattggggcgcgtttgggtgcgtcagtacaattaggtttacaagcattaattttgggagttgtccttggtgtaatcgctggggcaattgctgctatgagacagggtacttgggttgactcaactgctactgtaatttctattttgggtaaatcagttcctaactttgttttagcagttttgcttcaatactacatcggtttaaagctaggttggttcccaattgctggttgggggcaattttctcaaacgattatgccaacgattgctttggcagttggaccatttgcggaaacagctcggtttatccgaaccagtatggttgataccttaagtagtgactatattgagttaggtaaggccaagggcttaagtagaatggaagtcattagaaaacatgcaatgcgtaattcaatgattccattagtaactctgattggtccttatgctgtagccttgatgactggttcaatggttattgaaaatatctttaacgttcctgggattggtgaacaatttgttaagtcgattttgactaacgactatccaacaatcatgggaattacgatggtttactgtattggattagtagtaattctgttgattactgatattgtttatggattaattgatccaagaattagattagatgaaagcgaggcctagaagacaatatgactgaagaaaaattaaaccttcctgcagatgcctttgaacccttatcaaaagatgaagcacaggataacgaaaacattgcaggtccatctttatcgtttgcacaaaatgtttggcttcgcttcaagcagagaaaagcagctattatttctgcaattattgttattttgatgattgtagtagcttttggttcaaccccattcatcaataaatctactttagttaaatcgcacccacaatatgccaatttacctgctaaagtgccaggaatgagcgcaattaacgggttgaacggtaagattaagcaaaatggcaagtgggttgatgcttatgcccagaatggcgtgcctaaagataagtattttatcgcaggtacagattatttaggcagatctttgggacaaagaattatctatggtacaaagatttcattgatcgtcgctttagttgcagctttctttgatttaactatcggagtcgcgtacggaatagtgtccggctggaaaggcgggggagtcgataacgtaatgcagcgaattatcgaaattatctcttccgtgcctaatttaatcattgtagttttgatgttggtggtattaaaaccaggtattaagtcaattatcttggcaattgctatttcaagttggacgacaatggcacggcaagttagagcagaaactctgagtttgaaaaatgaagaatatgttttggcagctagatcattaggtgaatcaccttggaaaattgcttggaaacacttagtgccaaacctttcaagcatcatcattattcaaacgatgtatactattccaactgccatcttcttcgaagccttcttaagtttcatcggaatcggtatttcagccccagaaacttcactaggtgtacttttgaacgaaggacaaaagaattttcaattcttgccatatcagatgtggtatccagcaatcgtattgtgtgtgttgatgattgcctttaacttattaggtgatggtttgcgtgatgccttcgatccacggggacaaagatagaaaggattaacctaaatgccagaagaaagagttttagatgttaaaaatttaaaaattgatttccacacttatgctggtgaggttaaagctattcgtaacgtttcctttcacctaaataagggagagacgctcgcaattgtaggagaatcaggttcaggtaagtcggttactaccagaagtattatcggtctgttagcacgaaatgctcagattgaagacggtgagattgatttccacggcaaaaatttgctagagttatctgaaaaagaaatgcaaaaaattcgtggtaacgaaatttcgatgattttccaggatccaatgacttcgcttgacccaactatgaagattgggcagcaaattgcggagccattaatcaaacataagggtgcctctaagaaagaagcttgggctaaagccttggaaatgatgaaggccgtgggaatcccaaatgcagaagaacgaattaatcaatatcctcaccagttttcaggtgggatgagacaaagaatcgtaattgcgattgctttaatttgtgagccagagattttgctggctgatgaaccaactacagctctagacgtgactgtccaagctgaaatcttggacttgatgaaagacttgcaaaagcgggttaagacctcaattattttcattacgcacgacttgggcgtggtggccggtatggcagatagagtagctgtaatgtacgctggtgaattcttagaattcggtggtgttgatgaaattttttatgatccacagcatccatatacttggggcttaatcaattcaatgcctactttaaacagtgatactttggagtcgattccaggtacgcctcctaacttgcttgatccgcccaagggtgatccttttgcaccaagaaataagtatgccatgaagattgatgtggaaagaaagccacgatttttcaaggtaactgatactcactatgctgcaacctggcttttagcaccaggtgcacctaaagtggaaccaccagctgaaattacacgtcgctggaaaaaatataacttgatgaaacaagaagataaactgccagaggttaactagtcgcggtaaaggagatttttatgccagaaaaaaagaaaattttggaagtaaaacatctaaaacaatactttaaaaatggtcgtaatgtcaccaaggctgttgacgatgtaagctttaatatctatgaaggtgaaactttcggcttggtaggtgaatctggttctggtaagacaactactgggcgctcaattttgcaattgtataagccaactagtggcgaagtgatttttgaaggcaaaaatgtagcagatttaaaaagtcgtgcagacaaactagcttttacacgggatgcacaaatgatctttcaagatccttatgcttcacttaatcctagaatgactgttgaggacattattgctgaaggattagatattcaccatttggttaaaaataaagatgaacgaactgagagagtagaggaattattggaaactgttggcttaaatgcaagtcatgctagccgttttccacatgaattctcaggtggtcagcgtcaaagaatcgggattgctcgcgccttagccgtagagcccaaatttattgttgcagacgaacctatttcagctctagacgtatcaattcaagctcaagtagttaacttgatgattgaattacagaaaaagcgtggtttaacttacttgttcattgcccacgatttatcaatggttaagtttatttctgaccgaattggtgtaatgcactacggtaaactactggaagtaggtccagccgatgacgtctatgatcgaccacttcatgattacacgaagagtttgatttctgcagtgccaattcctgatccagaagttgagcggagccggacaaggattccttatgacgctcaaaaagaagaaatggacggaaagcaacgctcaatgcatgaaattcgtccaggacacttcgtacgctgctctgacgatgaagtcaagcattacgaagaagtagcggcaagctacgaaaattagataccaaatctaatgcaactctctctatattaatattatatttatgctaaaaaggcgatccgatatggatcgcctttttatatgatcattgctcgttaagctaatgaatcccatgctggtaggtcagtgattggaccttcagcgagcttcttttggttttcagttaagtacttcttgtggactacaacttcgtaaacatagtccttaaaccattcattattcatgacgtagaagcctttaacaccagatttatcgccccatgagttctcaactttccattgacgaacttcgccgttgtcttcatcaacaccaactaaagtcatggcatgtgacacttgaccgacgccggtctttaatctgtctgctttagacattttaaggtcaacgccgaataagtcatctaacttgtacaaattagtgtcaaggtaaccagttttacggtccatttgacgtaaaacatcgttaccaaaccaaacagcttcgccgtcttttaattgagcgatagcagcgctggacaagtattccattggtacattcaaaagcttgattctcagtgagccttcaatgttgtcttcagctggtagaccataaagcttgttatagtcatggtctggagcattggttaaaacaacatagtcatcaaaatcaacgccgcccatgtacttgtgtaaaaactcaagtggagttaggttcttttctaaatgatatttcttgtcgtcatcacgatattcaagatcgaaagtcttaggtggttcacctactgcgatagcagtcatttggtaaacttcgcttaaaaatttttcgcgaacctttttaatttcatcatctttgccgtattgcttcaagtggcgcaatactaaagcatccttctttaacttatcgcccaaagcagtagcaaaaccagttgtatcattggtgttaaaagtttctggcattgcatatgaaggaacaacaccatatttttcaactaaagcggcagccatttggaattgtccaccatcactaccagcaaagtctaagtcagccttaacttgacgtgaatcaagtggcatgtcagcactgtctaagattctgttgtagaacatgttagcacgttcgatcttatcccagaagaagttgtaagcttgtgagaaggtgaagtccttagccttatatttcttaccaaaagcgtggcgcaaaacgttcaaagtcgcaaacagccagcaacgaccagaatgtttttggttagtgacattatttgtatcaagttcagttgaaaagacgcgggttaattgtccttgaacacgatcattataagatgcttcaagtacaccactgcgttgagctgcacgagcaacgactttattttcaggttttttattaaattcggcagagaacttttctagttcctgcacagttaattcatgagccataaaaaatctccttttcattttataatttttttctcaatttaattctattttaaagcaaaacaaaagcgggttcaatcagaactcgcttgagagaattattaatccgtcaacttattagatttcttgcctatatctaataaattaatcaatttggatagaattgccatcattgccagcagtttcctttggcaaagtgatggtcaatacaccattatcatactttgcatgaatctcacttgcaactacatttggtaatctatagcttctagaaatactgccctcacttctttccttatgaatgatatttctatttttatcgctagtgtccttaaatgattttcttgtgccgctgacatttaacgtaccgtcattatagttaacgttgatatcctgcttatccatgccaggcatgtcaatcttaactagatagtccttatcagtttctgcaacatcagattgcataatgttttcaatttcattatcgtcaaagaagtttcttggaaaaccaaaccaatcattcattgcatccatcatgtcgttgcgccgattcatcatatcgtttgccataaataaaacttcctttcatttttgtatttgcttaattagaatataaggaaaagatcaactcatttcttgatctcttttctccttacactgtttattgtagtcgctttttatagaaatgacacaaattagcacttaaaaatttatagtgctaattttagactgataacgctgctacaataacattttgagattatggataattattacgtataaaaaaataaagaaagtttgtgaaatagaaatggtatattttcagaaaatgactccagaaggctatcaacaaattgaggatgaaattgctcgattaaaaaaagatcggccacgtagaattaaaattttgcaggctgcacgagctttaggtgatctttcggaaaatactgaagcaaaacgtgatctaggtcacttacaaagtcgtctgcgttacctaggcaaacaattaaagtatgccgaaattgttaaagctgaagatgatggtaaggttgatctaggaaagaccgttgtgcttaagtttgatgacgatgatgaaacagaagaatacaaagtggttgggcgaatggaagctgatcttgctgctggcaaggtttcttttgattctccattgggtcaagcaatcatgaaaaaggaggctggtacaacagcaacggtggcggcaccagtaggtgaatatcaagtaacgattgtggaagttaaataagttgagaactataataaactgtctttttctggtataatatgggttttgtaggatacaattcagagtaggagtgaagaatttgaatacgccacgatcaagagagggtaatgtgatccgctatgccgtttatttagctggctatgtcgctgtgtttgcagtagtaaagctagttactagaaaatctccggttcatatttgggatttgattttattcggcttagttgcagccatgattctgttgttttatgtttatcgtttcaatcgagagcaacgcttttttgcccgtgattataaacttccatggttgggcagtttgtcaactgttgttctattaacattagtgattacagttacacagatttcgatttcatacttacaatcatatggcaggattagtcattatgatttccaattgatatatgccaaaagtgaatcagttaacatgttttggtttttaatcgttgtccaaggaattgtattaccaatcctacaagaatttttggcgactggctttttgttcaattatgcttttcggcgaaatactaagcaagttgcaattatggggatcattgtttcaggtctgatttatagcttactgaactttcaaaattcagtagtactctttattattgatgcaatttatggcatggtgtttgcttggagctatatgtacacacaaacattattgatgccaatttacttagctgtagttagtggcgtacttacagtgattatgatttaaaaacaaaaggatgagaaaaattctcatccttattttttgtataaaaaaagcggatagcgtgaatcgaacccgcatctacagcttgggaagctgtcgttctaccatttaactatacccgcaatatgtttttattttagcattttttctatttgaagatcaacacttttacgatcaattaagctggtaaaattttgaaaaagccagcggcgtagttcgttgggcataacaactagaggcattctattatggattggcgccatatctttgttaggcgcggtagtaaccattgaaaaataatcctgatcataaatacctgcaattaaggtaagtggttgattagtgcggaaggcgtagcgatcatggtatttacgaccgttttcagcaatatgggtagttttagcgtattcaaagaatttttcggttaagattaagcaacgttgcttggcaaaggatttgtcccacattgaaggcgctgaatcataaaatcgctcaattctagcgttaaataatggcttttttggatcaacgggacttggatagccccattttttgttgcttaattgcaattgaccattttgataaagcaaaacaggtgctacttggttaggaaaaatatcttgtgcttgaatgtcaaaatttggtgtaactaagggcaggtcaagatcgcttttgagatattgttgaatttgttttaaattaggtaaacgaaactggttgcacatacgcatttcctttctttagggctagtttaatcatagcctattttttgttaaaattaggtaattaaacaattaatattaataaaaaaataaacttaaaaattagaaaagagcaaaaagatggcgaaagaaattttattaactggtgaccgtcctactggtaagctgcacattggtcactatatcggttcattaaagaatagagtaaaattacaaaattcaggtaaatatgatccatatattatgattgcggatacacaggctttgaccgacaatgctcgtaatccggaaaaaattcgcaatagtttgatccaagtagctttagattacttagctgttggtattgatccagctaaatcaactatttatgttcaatcacaaattcctgctctatttgaattgactgcttactacatggatttagtaactgtggctcggcttgaaagaaatccaactgttaagacagaaattaagcaaaaagatttcaaagactctattccaattggctttttaaactatccagtttctcaagctgctgatatcaccgcttttaaagcaaccgttattcctgttggagatgaccaggaaccaatgttggaacaaacacgtgaaatcgttaggacttttaaccgtgtttataattgtgatgttttggttgaacctaaaggttatttcccacctaaaggtcaaggacgtttgccaggacttgatggtaatgcgaagatgtcgaagtcacttggcaatgcgatttatcttgctgatgatgcaaagacagttcaaaagaaagttatgtcaatgtacacggatcctaaccatattcacgttgaagaccctggtaaggttgaaggtaacactgtctttacatatcttgatgtcttcgatccagataaggacaaggtggcagaacttaaggcagaataccaaaagggtggcttaggtgacgttaagattaagcgttacttaaacaaggtccttgaagcagagcttgcaccaattcgtgaacgtcgcgaaaagtttgctcaagatgaagatgcggtttatgaaatgcttctggaaggttcaaaaaaggctaataaagtggctaatgcaacacttgaacaagtccgtgacgcaattggtttgaactatttcaagaatagataaggctgaggtaaagttatgcacgatcgaattccttggaaacaatattttatgatgcaggcgctagtaattgcgcaacgctctacttgtaatcgcgcattagttggtagcgtcttagtaaaaaataatcggattattggcactggttataatggttccgtttcaggacaaccgcattgtgacgatgtgggtcatcaaatggttgatggtcactgcgttagaactattcattcagaaatgaatgcgatcattcagtgtgctaagtttggtgtttctacagaaaatactgagatttatgtgacacattttccttgctataattgctgcaaatccttgttgcaggcaggcgtgaaaaaaattaactattattttgactatcgcgataatccattggcgatgcaactacttcatgatagcggggtgccttatgaacagattaagattaatcgcaaatacgtggaaagcttggcccataaacttgaagaagacgagaattaatttaatttggttaatgggactagtaactgtatttttaataacgacaggatttgtccagccaaatattgaagatcatgctcatattttagataaagaaactcgcactttgattacggaaaaaaataatcgctattttcagactaaagaacaaccgcaaattgtcgttataacggttaaaaggctgaataagttaacacctaagatgctagatcattctaagcgaacggtctttattgtggtaggacagaaaggtaaaaagcgtaatgtgcaaatttattcaactaaagatttgcatagtgccttcaccgaggtcgctcggggcaatatcttgcgtgctgaagtagataaattgcgtagtcaaaataatgcaacttttaacaagggaattcgcttcgtctttcgggcatgtgcgactagagttgatcaacaatatcaatatgcacttgataaatatgatttgacgcaagcagaacaaaataaagtcgcgcgtccacatagtgtagctttaccaatcgcactggcactggcatttttaattacgggaattacttatttcttgcgtagatttagtcatcgtgatccaatttctaagaaatagtcggcttgacttatttgcattttgtccttacactttttatagacataattagcgaaaaactgttaggtgaaactcctacgtgaacacacgctatcgcccagaaacatccagagatgccaacgggttaaataggtgtcgtcgacttaaggcgagatccagatagctagcatgtgcttacgtcacgtagtgttaaaactgaacgacgagtatgacagagccttgtttggcaaaagtcacctgcagagttacaggtggcttttttgttttgcttgtcccaattaaagaagggagcaaataatgttaaaagcagctagcaagaagcgatcgaatatagacattcaaaggattcaacggattgcgcgtgagtcacgtagcgagacgctggcgcgtttacaggcgagtgctgaagggctttcgactaataaggctgaagaaaacagaagagaatatggcaaaaacgaaatcattactaatagcaattcctctaaatggcgcttattatgggaatcaatcgctacgccatttacgttggttttattagtattaactttattaaccctgtttactagctatattttggtgccacaaggagataatgacttaattactacgatagtgatgatcgtgatgttgattatctcggttctcgtcaattttatccaaaaaatcagaattgctaaggtaactgatcaattactcaatatggtatcagttacaacgaatatccggcgtgatggcaaaaatgtggaattgccaacagatgaagtagtggttggtgatgtaattaacttgtcggctggtgatatgattccagcggatatgaagttgttaactagcaaagatcttttttgctcatcaagctatttagatggggatcctgagccggcagaaaagatggctaatgtagtaattaagccgagtatggctaatgattatttgaactaccctaatattctatatgagggaacaactattgtttcaggctctggcaccgggattgtttttgcaattggcaatcacactgtttttggcaaagcagttcaggctatttcccgtaaaaaagtaaaaactaccctgtttgaccgggaaatgaagcaattagctaaaatattgattatcgcgacagcaattgtgattccgcttttgtttgtgattaatggcctgactaaggggaattgggggggaaagcttaattttcgctttgacagcggcagttggcttaacaccagaagtgttgccgattattgttaattccaatttaacacggggcgcacgggaaatatcccaaaatggtgctgtcgttaagcaaatgaatgctattcaaaatttgggctcaactgatgtgttctgtatcgataaaaccgggactttgacacaaaatcaagtggttttagagcgtcactatgatttagatatgcaagaaaccccacagattttgaagttttcatatttgaatgcatattatcaaactggggtaaaagatttaatcgataaggcggtaattgatgccgcgggcgatgaactagatgtaaacgaaattcagcgtgattacaataaaattgacgaaattccctttgactacactcgaaaaagaatgagcgtggtagtggtagataacgatgaacaccacgggcagcacttattagtaactaaaggtgccgctgaagggatgctggcaatttctaataaggttgaacttaatggcaaggttgaggatttaactactgcctggcgagaaaagatcttaaatcagattaatgaattaaacgatgacggtttacgggtacttttagtaggttataaattaaatcctgccccagtaggtgagttctctgctaaagatgaacatgatttaaccattattggctatttggcttatcttgatccgccaaaagaaacaactaaagaagcgctggaagatcttaaaaaagattatgttgatgtcaagatttttactggtgataacgaagcagttactcgtgctattgctttgcaggtgggattaaacgttgatactgtttatgacggcacccagatcgaagcggttagcccggaagagttgcgtgaaattgttgaaaaatgcgatatatttgtgcgaataaccccggaattaagagtaaaaattattaatgcactcaaagcaaacggtcatacagtcggttatatggggaatggcaataaagacgctttagcaatgaaggtagctgatgtgaccgtaacttcgaatacgtcagttgatattatcaaagagtcagccgatattatttttgagcaaaaagatttgcagctgttagaagaaatgattctaatgggccgaaaagtcttttcaaatacaatgaaatatattaagaccttcttggtaactaacgctggtagtgtaattgcgatggttgtttcatcgctgctcttgccatttttgcctcttttgccattgcaagttttaattttaaatttgctgtttagcataagttgtctggttattccctttgatagtgtttctaaaaactatgtcaaaaagccacaaaaatggtcgattaagagatggccgaagtttgtacttaattttggtccgattctagcaattattgattttatcgcaatgggcttgatgttttatgtgatttgtccatatttagtagggtctaattatcatcattgggtctttatgacactattttattcggggatttttgtggaatcgctttggacaagaattatggtgattcacactttgcgtgatgaacgttttccattctttaagcaacatgccacgccagtggtgttcttggtgaccattggtatggcaattattggtacaatgttgccttcatcaagtatcgcgccaagtttgggcctagctcaattgccgtttggttattggggcatagtcttcttgctagaagtaatctacattttactgacgactttggttaagcacttatatttaaaaaaagaaaaattctgatttgaattaaaaggaattgctggttttagcccaattccttttttttgcatgttaaaataaaatagatattttagacgattaaaggagtttgattaatcaatggctgataaagatactttttatattacaaccccaatttactatccatctggtcgcttaacgatcggtaatgcttatactactattgcagctgatacaatggctcgttacaagcgcagtcaaggctacgatactttctttttaactggtactgatgaacacggcttaaagattgaacaaaaagctgaagcacaaggaattaagccacaagagttcgtcgacaagatggcggcttcttacaagaaattatggaagagtctcaatatttcttacgataagtttattagaacaactgacaaagagcacgtagctgccgtacaaaagatttttgaaaaattattagcaaaaggtgacatctacctaggcgaatatactggctggtactcagttgaagatgaagaatactttactgaatcacagcttgctgaagtttacaaagatgatgatggtaatgtaatcggcggtaaggctccaagtggtcatgaagtacgtttggttaaggaaccatcctacttcttcaagatgagcaagtatgctgaccgtttggtggaatactacaaggaacatcctgaatttattttgcctcattcacgtgaaaaggaaatgcttaataacttcattaagccaggtttggaagatttatcagttacccggactactgttaactggggaattcctgttctaagtgatcctaaacacgtggtttacgtttggatcgatgcactttcaaactatattaccgctttgggctatggttcagacgatgattcattgtttaagaaatattggcctgcagacgttcacttggtaggtaaggaaattgttcgtttccacactatttattggccaattatgttaatggctcttgatttgccacttcctaagcacattatcggccatggttgggtattgatgaaaaatggcaagatgtctaagtcaaagggaaatgccgtttatccagaatcattgactagtcgttatggtgttgatccacttcgctattacttgatgcgtgctcttccatttggcgatgacggtatttttacaccagaagactttgttgaaagaattaattatgacttggccaacgatttgggtaacttacttaacagaaccgtgtcaatgattaatcaatatcaagctggtcatgttgatgcagttcccgttgctcaagctgaatttggcaaagacttgcaagatacagctgctagtgtcattaatgattatcgcgaaaatatggattcacttcacttttcaaaggcattagacaatatttggaagttggtttctcgtgctaacaagtatattgatgaaactactccatgggctttgaacaaagaaggtaaaaaggaagaacttagcaaggtcatgagcaatttggctgaaagcttgcgtttaattgctattatgattgaaccagtaatgaccgaaactgcaccaattatgttcaagcaacttggtttaaattgggacaatgaagacgctaagcatttggcctttggtgactttgattgggatgttaaagtaattgaaaaaccacaaccaattttcccaagacttaagatggacgaagaagttaagtacatcaaggatgaaatggctaaagctaagccaaagaagaccactagaagtgaacaaaagaagggtgacgaaatcaccattgacgattttgacaaggttaagatccaagtaggccaaattttgtcagttgaaccagttaaaggctcaagcaagttgctcatgttcaagctggactttggtaatggcaaggaaacccaaattttgagtggtatccgcaagttttatccagatgcaagtgagctattagacaaaaaggttttagctgttactaacttaaagccacgtaagatgctgggtcaccttagtgaagggatgctcttatcaagtgaaaagcatggcaaaattaagttagctcttgttggtgatgaacatgcagttggggctgaactcggctaatggagatcattgataatcatactcatttgaatgacgagccgtttcgcggcaaggaacaatattatttagaacgagcaaaagcacttgatgtaaccaaggttatttgtgcggggcaagatcctgactttaatcaaagagcggttgacttagcacaaaggtttgataatgtctatgcgatggtcggttactgtcccgatgtggctaaagactatgatcaacaggctgaagataaactaattgaacaattgaagcagcctaaggtagttgcaatgggcgaaatcgggctagattattattgggatgaatcgccgcgcgacgtacagcgtaatgtttttgcgcggcaaattgaagtagcacatgacttgaagatgccagttgatatccatactagggatgcatttggagattgttataacatcttgaaaaatagcaatctggaatatggtgctgttttgcatagttttaacggtggtgttgactggttaaataagtttttggatttgaatgtttacttttcatattcaggtgttgtttctttcactaaggctacggaagtacacgagagtgcaaaagctgcgccacttgaccgaattttagttgaaaccgacgcgccatatttaacgcctaagccatatcgtggtcatcaaaatgaaactggctacgtacgttatgtggcagaagcaattgctaagttgaaggatattccactagagaaagtggcggatgctacttataagaacacagtgagagtttatgggcttaaataaaaagaattttgatgcggtaatcgttgttgaggggaaagacgataccatccgtttaaaacaatttttcccaggaatcgagacaattgagactaatggatcagccgtttcagatgaagtattgaagcaaatccaaaaattaagtgagagtcggcaaattattgtctttactgatcctgactttaatggcgaaagaatccggcgcattgtaactaaagctgttcctgatgcaaagcaagcttttattacccgtaaggaaggcgaacctcataaaaaggggagtctaggtgtagaacatgcttcaaaagaagcacttgagcatgcactaagtgatttgcatgaggttgaaccgcaaaaaagtgatttaactccagcaatttatcggcaattaggtttagctggtggtagcggctcacgaaaattacgtgaacaagtaggcattaaattacgagttggctatggcaattccaagcagttttataatcgcttgcatacttttggcgtttcattagctgaattaaaggcagctgtcaaggaggtagaaaatgacaaataatattccaattggctctccagttagaacacaagcaattgttaaccgttactttgtcaaagctaaaaagaacttagggcaaaatttcttagttgatcagactgctattttaggtattgttgaagctgctgggataaaaaaagatgatcaagtcattgaaattggaccaggtattggctctttgactgagcaactactgttggcaggtgctaaagtttttgcttatgaagttgatgatagcttacctacgattttacagaatgaactgcctaagaaaattgatgatcagcctttggctagtcgctttaagctgatcttgaaagatgtattaaaagcggactttaaggtagatattagtgacttctttgattttactaagccaattaaagttgtagctaacttgccgtattacatcactacgccaatcatttttgccttagctgaatcagatttgcactttacttcattgaccttaatgatgcaaaaagaagtagcagaacgattagaagcccaaccaggcagcaaggaatacggtccgttgactatttccgttcagaccgaaatgaatgttaaacttgctttgcaggtgagtcataattcctttatgccgcgaccaaaagtagactcgagcgtagttgtcttaacgccactgaaggaaaagccagcaattgaaaatcgtaagcattttatttgggtagtgaaaatgtgtttttcacaaagaagaaagacactcaataataatttaaaagctttgttgcctgataaaactaagcgtgatgaattatttgcggaattaggggtaaatccaagaattcgccctgaagaattaacaattaaacaatttattaaaattgctagctttattcctgcaagatgatgtataatattgaatttattatatatttgtgataaaatgttgctaaaggagctgttgtttagtgccaacatcaattatcacaattaaacataagttggattctcacttaggtgatactttaacagtagtagctcaagcgggtcgtaagaaagttactaagagacggggaattctaagagagactttccctgcagtgtttgtggttgatttagaccaacatcaaaataattttaaacatgtttcttacagttataccgatttactaactaagaatattgcattagagtttgatgatgaagctgaagaggctgaagcttaaacacaatttttgaaattgtcactagcatttatttaaaatgttagtgcttttttttgccctttagagtatattaattaagtataaaccaaacattagaaaggagatttcatgaaacgttcagaaagattggtggacatgaccaaatatttaatggagcgtccccatactttaattgcactaccattctttgctaagcgttacggcgctgctaagtcatctatttcagaagatttagctattttgaagcacactcttgccagcaatcaagatggtattttggagactgtagccggtgcagctggtggcgtgcgctatattccatttttaggtaaaaaacacgcggaagcatatttgtcagatttatcaactaggattgaggatccaagtagaattttagccggtggttttgtgtatctgtcagatattttaggcaatacgcaagatttacgtaaaattggtgaattagtagctactcattatgcttatgaagaaatcgatgctgtcatgacagttgaaacaaaagggattgctttagccaaagcagttgctcgttttttagatgtaccatttgttacagctagaaagcgatcaaaggtaacagaaggtgctactgtttctgttaactatatttcttcatcgttgtctcgagtatcgaagatggaattaccgactcgtgctcttaaaaaagaagctaaagttttaattgtcgatgattttatgaagggtggcggtaccctaaccggaatggaagaattagttaaggaattcgatggtactattgccggcgtttgtgtactctgtgaagccgattttgacaaagaaaagctgattaagaactatctttcattagtaaaaattagtgaaattgatactgcccaaaagctgattgtagcagaacctggtaacttcttaactgaaactgattttgaccgtttctaaaatggtatactagaatcaagttttgattattaagaggttaatattaatggaaaaatatgtagttgttcttgccgcaggtaagggcacacgaatgaagtcaaagttgtacaaggttttacacaaagtttgtggtaaaaccatggttgagcatgttgttgatgcagctcaaggcgttaatcctgcagaaatcgttacaatcgttggtacaggtgctggcgatgtagaaaaagtactggcagacaagtctaagtttgctttccaagaaaagcaattaggtactggtgacgccgtaatgactgcgcgtgaagaattgggtgacaatgatggtgctactttagtagttactggtgatacaccacttttcacaactgatacatttaatgaactattcaagtatcatgcagaaaaaggcaatgctgcaactgtattgaccgcggaagctccaaatccatttggctatggtcgaattattcgtgatgatcaaggcaatgttttacgaattgtagaacaaaaagatggtaaaccagaagaattaaaagtaaaagaaatcaatactggtgtattttgctttgacaataaaaaattatttgaagcattgaagcacgttaataatgacaatgctcaaggtgaatattacttaactgatgttttagaaatcttgcgcaatagtggtgaacgcgttggtgcttacaagatgcctgactttagtgaaagccttggcgttaatgaccgtattgcattagctcaagctactaagactatgcaaagaagaattaatgaacagcatatgcgtgatggtgtttcatttatcgaccctgatactgcttatattgatgcagatgttaagattggcaacgacactgtaattgaaggtaatgttgtgattaaaggaaacaccgaaattggtagtgattgctacattactagtggttcaagaatcgttgattctaagattggtaataatgtcactgttacttcttcaactgttgaagaagctgaaatggacgataatactgacatcggtcctaattcacaccttcgtcctaaggcaattattcgcaaaggtgcacatattggtaactttgtggaaattaagaaggctgagattggtgaaaatactaaagtaggtcacttgacttatgttggagacgctaccttaggtaaagacattaacattggctgtggtacgatcttctctaattacgatggtgtaaagaagttccatactaatgttggtgatcatgcctttattggtgctggctcaacattgattgctccaattaatgttgcagatcacgcctttattgcagctgataccactgttactaaggacgttaataaatatgacatggcaattggccgtggccgtcaagttaataagccagattattggcataagcttcctctttctcaagataaagaatgggattaagaataaggcactagtgtatcaagctagtgcttttttgttaagaattgctaactaagtgtataattttttacggtaagttgaataaataattaaaaaagcccaagtcctttgaatttggacttgagctcaaacaaaaagaccagtagtctgatgttaagaacaaaaaacacattagaagctggtcttttatgaattcaattgtaactgaaatcgcaaatattataaagtctgaagataattatattaagcgtgaaagaaaaataatctgtttcttcttaaacctgattaaggaaatcatggccttggctttagctaaagttgatgatgaaatgattaccaaggttaaagcacagggctatcagattgataagaagaatgagcgctcaatcaatatggcttttggcgaagttaggtatgtcagaagaagatatgtctgcccaggcaaacaagcaaggtatcccttggatgaattaatgggctttgacaaatacaagcgctacagtattttagcagtcaaaaacatcttagaagtaagcagcgttgccacttatcgcaatactgctctagcagtcaattgcctgtctggctttaatattagccatatgcaggtgggcaatttggtaaaaatggccgggaaaaatattaaagcgggccaagaagcagattcaagatatgatgccgcaggcactaagaaaaaggtcccagttttgtatcttgaaggcgatggcgtggtgatcaaaggcactaaaagccggttggaatttcatcgctatcaggtctgtgaaggcattgtcaatataagcaagaaacgcagaaagcgaatcaatgccaaggaatttgtttctttaagccgacttgatgcgctgaacgaagccaaggagtacctggccaatacttatgatctttctgatactgtaattcttagcaacgccgatggcggtgctggatatgccaaaacagacttcgatgacattgtagggctatgcaagcgtcatgagcatttcttggatgtctttcacctaaataagaaaatcaaagaaaggctatattttgcgcctgacctgcaaggcaagctgatttctgctttggaatacaaatacagctatgacaaagttaaaactatcctaaccactgcagaaagccgactaattgatgaattgaataccgagctcaatcatgattatctggggcgcctaaggaattatattgatcgtcattgggacgatattaagccgtttaagaaacgaaaactgactgtgactaaagccattggctgctgcgagagcaaccaccgcaagtatacctaccgtgttaaggggcaaggcaagaaatggtcaaaatctggagcagaaggcatgcttaggatcttaagctgcatcaagaatcgagagctggaattttggcttagcagcgagtttgaagattcagaaataactgtattgactgaacaggaattaaaagcagcggcccgtgacagcttaaagaagcgtcatgaagttcatttaggcatccagcatggcgcattaaccgcacaggtagctggcaatagttatttaagcaagctaagcagaaatttaagtcatataaatatttaagaaattaaggttagactaatggtttaaaggctaccgcaaaaacattgacacttacaattgctaaatacttattgcaaaataataattgagacctacaataaggtgtactaataataatttttacatgaggtaggtaatacaatgaaattaagtcataagttagttatggtttcagcagctgttttgatgggtgttagcccagtattaggcatggcagaaaatactgtatctgttcaagctgctactaagagtactaatggcgtacataatacttacggtaaaaacagcaaagtcaaagtaactaagactatgaagtttgtcgaccgtaatggtaagaaaacttctaagactgctcctaagggtggtagctacactatttggaacgtcaagaatatcgacggtcaagtttactacagtattcaaactgatttgaagtactggattcctgcaactgcaactgaaggtacagtaacttataagtcaggcaatactacttatactttaaagagtgatggcaagaaggtaacaacttctacttcaactaagaaggctgttaagaagactaattcaaataaaaacactaaaaaagtagttaaagaatcaactaaaaaaactgccactaagactactaaaaaaagcaactcagaaaagactactaagaaaacttcatcaaagaagacgccagtggctaaggcagttaagataactactaagaataaggcttacgtttacgacaagaatggtaagcgtgtaaaaaactatttaggcactagttacattggtaaaaagatcactgttaaaggtttaggtactaagaccattaatggtgttaaatattatgctttgcaaccaaatcattattacattaaagcttcagatgtaactgttaagtaataattgataggaaaaagacactttttcgtttctaaattggcaaaaaaatattttagatctacaatatataaatgaactttaagtttagtaagaatgaggtatttatcgatgaaattaagtcataaattagttatggtctcagcagctgcattgatgggtgttgctccacttttgggtactgcagaaaacgtcaacactgttcaagctgctcctaagaagactacttcaaagaaggcagcaagcaacaagatcactttggtacgtaatgcttatgtgtacgataagaatggtaagcgtcttgataagtacatgggcagtgcaaaatacactactattgctaaaggcgtaactgttacttcaactggcactaagactatcaatggtgtaaagtactacgatcttggtggtggtgcttatatcaaggctgttaacgtagatggtaaagctgcgtcatcaacttcatcactgtcaaagggtactaaggctaagtttgtttctaactcatacatttatgacaagaacggtaaacgtatcagcaagtaccaaggcaaatctaagtttgttaagggtgattcagtcactacttacggtattcaaaccattaacggtaagaagtattaccaacttgacaagaagggtactgcttttgtacgaactgttaacattgatggtaaaaccacttcaaaccaagaatcatctgtttcaaatgatgcagaatcaattaaaaaatatgactactcattaaagaagaatgcttatatttatgataagaatggtaagcgcatcaacaagtaccaaggcaagtctaagcttttaaagggtgccgcaattgatgtttatggcattgaaaccattaagggtaaggattactaccaacttgacaagaaaggcactgcttttgttaaggcaagtaatgtaactagaaccgttaaggcaacttcaattaccatgaagaagaatgcttacatctacaatggtaacggtgacaccaagaagaagacagttaagaagggtaagactgttaaagctactgaagcaagatacattggtactaagctttactacaagattagtgataatcaattcgttaaggctgctaatgtaggtaaaatttcaggcccagaactagaaccagttaacgaaccagatggtgctgctactgttgatactggtgataatactgtagatccaaacgtaaccaaggcaactacgattaatgttgctccactttacaacattaagggacaaccagataacgttagagcatttggcgaaggtcaaagtcaacaagtttcagaattgagatatattgcaacttctgcaactgctactccagaattattctataaattatcaagcggtagaggctatttaaaggcttcagacgttgctgtaagtggtaagacattaactcctgttaacactccggaacaagctagagaagacgttactgttgccacagcagctaacaaggctaagttgctccaagacattaatgaagcaactagcgttaagaattcagaagcttacaagctcgcttcaagtgatgtaaaggctgcatatgacaaggcaatcagtgatggtacaactgttaacaacgatgctacagctactattgctcaagttaacgaagcagatgctgctattgttagtgcaaaggctaaacttgatggcaagagagttgctgttgctaacatgaccaatttaacttcagatgaaatggcagctattattaaggttgtagctaatgctaataatgtagcagaaagttctgttcaattaactactaacggtagtttatcaattagtgttaacggagctgcacaaattttgaacttaggcgattatgtaacacaagctgcagttgcaaacaactaaaaatatataaaataagacgtagtatctaaaatgacactacgtcttattttttaggatattttcgttgtactagaaagtacaaatatattctaacttttttagcgattaatagttagtgcttttttatggttgcggcaaaattcttgctataattaaggagaatgtggttctttttagagcaacttttgctaaaatagagctggttaaatatttttacggaggaaattatgtcctataaagacgatatgatgatcttcgcccttaactcaaatgtaccattagcacaaaagattgcggatcgtgtgggtgttccactttccaagtctagtgttgaacgtttcagtgatggcgaaattcaaattaatattgatgaaactgtgcgtggtaaagatgtctaccttgtacaatcaaccagtaagccagttaacgacaatttaatggaattgttgattatgattgacgctgtacgtcgtgcaagtgctcgtacaattaacattgtgatgccttactacggttatgctcgtcaagatcgtaagactcgtgctcgtgaaccaattactgctaaattggttgcagacatgcttcaagctgcagttgctgatcgcattctttcacttgacttacatgcaccacaaattcaaggtttctttgatattccagttgataacttaatgggtgctccacttttggcagactacttcttgcgtaacggcttagagaaggacgctgttgtagtttcaccagaccacggtggtgttactcgtgctagaaagcttgctgaattcttaggttgcccaattgccatcgttgataagcgtcgtccaaaggctaatgttgctgaagttatgaacattatcggtgacgttaagggtaagcgtgctatcatcattgatgacatgattgatactgctggtactattactttagctgctcaagccttaattgatgcaggtgctactgaagtttatgctagtgcaactcatgctgttctatctggtccagctattaagagattgaacgattcaccaatcaagaatttggttttgactgattcaatcaatcaaccagcagagaagaagcttgacaagatggttggggtatcagttggtccattgatgggcgatgctattaagtgtatccaaaaccatgaagcacttagcccattgttcaacaccagatacgaagctgacaagaacaagtaagataaaatttgataataaaaaatggctagccgagaggttagtcattttattttttttggaaaaaatcatcaccatttataataaataagagtgtattaaaatacacatgagaaacatctataattagagatagatgtttttcatttaaagaggacaaaattatgacacaatatttatcattcgatattggcgggactaacttgaaatatgcattaattgatcaagaagggcatattcttgaaaaagaccgggtaaagactaatactgaaaacctagatgcattcatgcagacgatgtatgaagtcgccgacaagtatcaaggaaagttcgctggcattgcagtctgtgctcctggtaagattgataccaagaataaaattatctattttggtggagccttgccattcttagatggcttgaatttagaagagactttaggtaaaaaatatgatgtaccagttggcgtagaaaatgatggtaaagcagctgctttgtcagagcaatggctaggcgaattgcatgacgtcaatactgggatcgcaattaccttaggcactggtgttggcggcggtgtcatagttgataatcgtattttacatggctggacttttcaagctggcgaattgagttggatgattacgaattcaagtattggtactaggaatatggctgcttatgctggctttagttgttctgcggttaatatgatcaaaaaagttaacctggctttggggaatatcgatcttgataacggcttgaccgcgtttgaggcaattaacaatggcgatttaagagcactagccgtttttaaacgctattgccgcaatgtagcaatcatgatcctcaatattcaggcagtaatcaatggctctaaagtaattattggtggcgggattagtgcacagccaattttgattgaagaaattaacaatcaatttgataaaattttgcagaataatccaatgttgaataatcaagtgattaagccggtgattgtggctgctaagcatggcaatgattctaacttatatggtgcactttatgcattactgttggaattaaatgacgaagaagttaggtaaatattgcaacacaaaaaagggatgcgtcgcatcccttttttacatgagctaaataataatttaatctttgccagaaacaatcttggcaatcgcaatgctggcaccagcaacgcaagctaccatggcggttttacaaccaatcttgactacgtcttttaccaaatccttattttcatgaatgaagtcaaaagacattttagtatagtccatgcagtaaccatgaactgtgtccatcaagtctttaacttgagtatagccgctcttaggttctgcctttacttcatcttctggattaatttgagttcttacatctgtatttaaatcatgtctgttcatcataaatacctcgattctaagatttaccttaattttacttcttttgctcacgttttggtcttctcaaatatcttaaggcaccattcttaatatatttttgaaattgctcataaagtggatcgaaaatttgcggctgatcttcatcgtgactgagcatagttttagggaagaagaagcgttcatctccttggaaagtaccatttaatgcgcgaaccaatgggctgagttgggataactcaatcatgctgccgtcgtcttgcataatttcaatttgactattagcatttttccccgttggcttataagcatcatatggttcatcgaatgcggaattggtagcggtatagtagtcaggattaaagccagcttgcttgattaggctcttgagcttaggtaaaagatttttggtttcttcatcgattcggacactagctagcggttttctgtacaagtaacgcttggctaggtcagataagattggatcttgtgcctgggtccacatagaaaaattagtttccattactccatcatcaagctttaaataatcgtctaaagtccaattgccttcaaggaatttagtcaagctaggtgtaacttgcagatttccctttttataaacagtttgagcgcgctctaaaaggtgatgcaagatgacttccattgagcgtcctacgcggtggaagtagacctgttggtacatctgatagcgtgacacgatatagtcttcaacggcatgcatcccattgttggtaaaacaaataccattttgataaggacggattacccgtaaaattcttgataaatcgaacctaccatagttaactccggtgaaataagcatcccgctgcaaataatccatccggtcagcgtcagcttgacttgagatcattttaaccacttgcggattaggataagtcttagcgattacgctggcgactaattcaggaaagttaggtgcaacttgttttaatgcatggttaatttctgtattagggtcagtaatgatcttttgtccaattttttcatgattggtgccaaaaaggtgctcgaatgtgtgcgaatagggcccgtgaccgatgtcatgaagcaatccggcacattctaccagtaatcgattatcatcgttccagagaccgtctcctggcgtaattgagggatattttttgctaaagatatcgcaaattcttctcgttaattcataaacgcctaagttgtgctcaaatctagtgtgagttgcacctggaaaaacatagctaacaggacctaactgtttaatgcgacgcatgcgttgaaattctttagacttcagtatgtccaaaacaactttatcttcaatatgaatatagccgtgaaccggatcacggagaacaacctcttgttttaatttttcgctttgaaatcttgtcataaaaatccaccaagtttaatttattaattttttgaaactgtcaaatcttttgtgtaaatagttctttctcgtaaattgattttttaattatttatttaatcaaagtaggattctaaggtgtcctgaacctgaccaaagcctttatgaattcgattgaaataacggtcattgtagctcattgcctgaatgccaataaaagcatcaagcgactgttcagttggaaactctgccttaggcttagcttggcgcttgatcacattgttaaatgattcaatcatgttagtcgaataaattgaagctctgatctgcttgggatagttataaaagaccagcagatctggttctatgtctttcaagcttctgataacatggctgtaaaccttgccccatttggtatagaagtcatgcaggacagctgtggcttcttctttgtttgtctgttgatgcacctgtttgaattcgttcatgatcttttcacgatcgtcgacgcgtactttagcgcagatattgcgcatgacatgaaccaaacagcgttgaaaatgagctttaggataagtcctggccaaggctgttttcatgccaacaacaccatcagaaagaaaaagctcaacttgctttaagcctcgggatttcatgttttgaagcatatctgtccagacttcaatgttctcgctaggtgcaatgcagtagtcaatgacctccttgtgcccattaggcttgatgccaatggcaatatagactgcttcacgctcaaatgtttctcggcgcaaaggaaggtatgtcgcatccaaatagacgcagaaaaacttgtcgcttagcttgcgtttgtggtaagcctcaacctttggaatcatctgcttggaaatatttgatacctgagctggactgtaatggctgccatacatcttttcaattagatcggctatttccctggtggtcacgcccttggagtaaagcttgataatcatgctttccaagatatccgagtgctgcttgtagtcaggcagcgtgtgctgatgaaattgaccgttgcgatcccgaggcacttgcacttcaattgggccaaattgcgtatcaactttgcggaaataagcaccatttctagagttgccagtattccagccatttctggcatagggatcatagcccagaaaggcagtcaattcagcttctagcaagttattaacagcctgttgtagctctttgcgcaataaatcatttattttgtctggattgaatagagcttgagcaaaatctttggtaaaatcattcatgaaggagttcttctttctgtatgtgttttttgttcaaaccaatcatacgagaaaggaactcctttttctaatgtttaaagaaataaatttaaggaatcattcatccttacacaaactattttacagtctcaattttttgaactatatataataaaatagattacgcgtggtgctagttaaatcgttctagacaataagccaaattataagctaaaattgcaatttccaaccggctttgaaagcctatcagactacgtgctcgattgttctcggcattgtaataggtcagaagcgaaaagtcgctttcaattgttctgcgaatagccatcaattgatgatcattgtgctttttagctcctgtcatatttttacgatatggtgtccaaagttcgtaacccatttgttttagctgttgatgcagttctttgcctaaatagccttcgtcgccaagaagatagtaattagatggatgggtattttctatcagttcaactgtctccctggcatcatgaactgatgcctttgttacgacataatcaagaatgtaaccgtcatcgctaacaatggcatgaactttgaaaccatagaagtaaattttcttggtggccttataaccaatgttggcataaccgcgaaaaattttagcacgatagtttcgaattggttggcaaacaggtaccggaaagctgtcaatgatcaagaactgtccattcaggtcaacctttttattcatttcttgccgtatctgataaatcaattgcaatagctgacgtgaacgccgattaaaacgtgagtgtgataaacaattgaaacattcacagaatcttctttgtgattcaattcctgtcttagcttgccagataagtaaagccaaaatcagactgtccgtagttttaatttgatcaatatttcgccgatgagtaaactcagccggtgcatacaaacgataccagtgccgacaaattatcactaaatctttaaaactaacttgtaaatggtggctaaaacgcttaagcttaaggcagttcaatcagatcagactcttttctattattactatttacaagtcgagtctaacaagattggacttttttattaactaaaacgatttaactagcaccacgcgtaatagattatatctaactaaaattatatcagagatatagtaataatgtttaaagggggcgcttgtttgacagcaattacgattgatttgactagtaaaattactcaagacgatgagacagagacttttacgcgacatgcgcaagggcaattgactgaagaaggcgacgtcacacgaatttcttatgccgaagaagggcaaattccagtgaagatgcttctaaaggagaatgaattgttgattcgccgcggcgttgacagcaataattattctttaatgaaatttattccgggtgaaaaaggcaactgccgctatgtagttggagggcgccgcatggacatgactagcgtgactaatttgcttgaatatcagagtcaagatgatggctcacgtaaacttcgggttgaatatgacctctttaatggactatacttaataggtaactatgcagtcacgttggtttttacttaaaggcctagtagaatagtaaagattgtataagagaggacgtacagctgtgggattagacaaatttaaagacaaaaatcgcgatgaattgtcaatgatcgaagttgctcgtgcaattttggaagacaatggcaagagaatggcatttgccgatattgttaatgccgtacaaaaatacttgaataagagtgacgaagaaattcgtgaacgtttaccacaattttatactgatatgaacactgatggtgaatttatctcaatgggtgaaaatgtttgggcacttcgttcatggttcccatatgaatcagttgatgaagaagttaaccaccctgaggatgaagaagacgattcacgtaagcaccacaagaaggttaatgccttcttagctagcgctactggtgatgatgacattatcgactacgataacgatgatccagaagatgacgacttagacgccacagacgatgatactgattatgatgaagacaacgacgatactgatgatgtattgccagatggcattgaaggtcaattgtcacaattaaatgatgacgacgaagataattaatttgcttgacttaagaagaaaaagcagataatatttttgttgggcaccctatgtgcgtttagctccccgttagtgggagcttttttgtttaaaggataagttaaaaggagcagaacatgacaaaatacatcttcgtaactggcggtgtcgtatcttcacttggtaaagggattactgcatcaagtttaggtcgacttcttaagaatcgtggcttgaaggtcactatgcaaaagtttgacccatatattaatattgacccaggtacaatgaatccataccaacacggtgaagtttatgttaccgacgatggtacagaagctgaccttgacttaggtcactatgaaagaatcgtagatgttagaactagcaagtattctaacgtaactactggtaagatttaccaagaagttttggaaaaagaacgtcgtggtgactaccatggtgctactgtacaagtaattcctcatattactaacatgatcaaaaagaagatcatgcgtgcagctttgactactgattcagatgtaattatttctgaaattggtggtactgttggggatatcgaatcaactccattcatggaagctattcgtcaaatgcgccgtgaagttggcccagaaaatgtaatgtacattcactgtactttagtaccacttcttcacgctgctcatgaaatgaagactaagccaacacaacactcagttgctgagcttcgtagtattggtattcaaccaaatatgttagtgcttcgtgctgaacaaccaattgaccaagaacacaaagacaagatttctacttttacagacgtgcctgttgatcgaattattgaatcaattgatgctccttcattattcgatgtgcctttgaacttccaaaagcaaggcatggatcaaaaagtctgtgatttcttacacttagagagtccaaagccagaagctgacatggaagcttggaagaagcttgatgaacgtgctaagaccttgaagcatcacactaagattaccttggttggtaagtatgtagagcttgaagacgcttatatttcagttactgatgctttgcaacatgcgggttatctttacaacactaagattgatgttgataaggtacaagctgaagacgtaactgaagataatattgcagaaatcatgaaggattcagatggtttgattgtccctggtggttttggtactcgtggtcttgaaggaatgattactgcaattaagtatgctcgtgaacatgacatcccattcttaggtatttgtttggggatgcaaatggctagtgttgaatttgcacgcgatgtattaaaccttgaggatgctaattctgcagaagcagagccaaactgcaagaataatattatcgacattatggctgataagcgtgatgaagaaaatattggtggtactttgcggttaggtatttacccagctactcttaagaagggaactaagactcgtgcggcttacgatgatcaagatgttattcaagaacgtcaccgtcaccgttttgaattcaataatgaataccgtgaagcctttgaaaaggctggtatggtcttctcaggcgtttcaccagataaccgcttagttgaaattatcgaattaccaaagaaaaaattctttattgcagcacaatatcacccagaatttttgagtcggccacaacgtccagaaggcttatttaagtcatttattggtgcagctagtggtcttccagcacaagaattttaaagtgattaaagtttgattatacaaaatcttaagaaaacaagaactgagagacctcagctcttgttttttttgtaaatatcctttaacattattatgattaattgaaagtagaaaaggatttgttttcgccaatgaagcagatgataattcatggtggaaagcccctgcagggtgatgtttggatcggtggagctaagaactcaacagttgctcttattccggcatcaattttatcaagaacaccagtgaccttggaaggcgtcccaagaatagctgatgtggttaacttgatggacttgttaagtgagatggatgtacattgtgatttcggtgaaaccactttaagaatagatccaactgatatcaaaatgagtccgttgccagctggtaagattaagagtttgcgcgcttcatattactttatgggtgcgctacttggtcgctttggcaaggcagtagtgggcttccctggtggtgacgatattgggccacgtccgattgaccaacatattaagggctttgaagccttaggcgctagcgtaaaaaatgaaaatgatcaaattataattactgcaccagaagatggtttgcatggagcaaaaattcatttaaagatgccatcagttggggcaacgatgaatattattatggctagtgtgacagcacagggccagactataatcaaaaatgccgcaaaggaaccggaaattattgatttagctaccttcttgaacaatatgggggcagttattcgtagtgctggtactgactctattcgaattgaaggggtggagcagcttaaagcacagattcctcatacgattattccagacagaattgaagcagggacttatgttgctttagctgcctgtattggtaatggcattcgcattcataatattatcgaagaacaccttgattcatacctggctaaagttgaagaaatgggtgtagtaatcgattcagatgaagattctttgtatgtttacccagcgggcgacctaaaaatggtccaggtgaagacagatgtttatcctggttttgcgacagatttacagcaaccaattacaccacttttattaactgctaaaagcggtgaaggtgtagtaatcgataatatttatcctaaacggattggtcatattgctcagttgcaaaagatgggagccaatattaaagttgaagataatattattttggcccatccaactaagcagtttcatggtgcggaagtaactgcaggtgagattcgggcaggtgcctgtctgatgattgcaggcctgatggctgatggtacaacaacgatcgacaaggctggtaatatcttgcgtggttatgatcgggtccaagaaaagctgcgtcaacttggagctgatgtaactatcaaggatgatcctgctgtaccgggtattttagataatatttggtaaataaaaaccacatggaagactccgtgtggtttttgaatatgtcaatttgtaggtgaaaagaatgagtttgatttttacgagacgtgcgcaaaattcagatgtggataaaattgtgcagattttgcaggatgctattacttttttgaagaaaaatggctcaacgcagtggcaaagtggctatcctaaccgagaaacggtggaggaagacatcgaaaagcaagttgcttgggtattaactgtggataatgaagtggctggctatgcggcagtggtgattggaaaagatccaaattatgccaaaattgatggtgagtggaaaaataatgtggatacctatgcgacgatccatagaattgcggttgctagccaatttagagggatgcatttgactcaattgttcttaagtaatattatttcgctgacttatgcacaggggattcacaactttagaattgatactggcgcaaaaaataagatcgtccagcatattgcattgagtcacggttttgttcaacgagggataattcaagtagatgatccgattaatcctgatcgtttagcatatgagttgaatttatgatgaaacgcgtattaattttaggttcaccaggagcgggcaaaagtacatttgcacggaaattgcaatcaaaaacgaaattgccattggtgtatatggatcaacttttttggcatgcaaataaaactacggtctccaagcatgaattagatgaaaaagtaaagcgcatagtagctaaaccagcatggattatggatggaaactatcaacgtaccttgaaatatcgtttacccaaatgtgatacgattttttggttagattatccaactgaagtttgtctagctggcgtaaaagctagaaaaggaaaaccacgtcctgatttgccatggattgaagaagatgaagatccggaatttatgagttatattgccaagtttcggacagttcaaagaccgattttagtcaaagaattgcaaaaatatccaaataagcagatcattgtatttcattctcgccaagaagcaaatctgttcttgcacaaaataaggtaaacgaaaaaccacatggttgaaaattccgtgtggtttttgtatgcgattaattttttaatcaagcaagtcgtatttcaaagtcattaaaccatgaccttcgtcaaccatttgaccaagcagttcaacagtgttgttataaactgtatcagacatcttttgattagcagcaattaacttgtcttgtaattccttacctgaaaggttctttgcttctttgtcagtatcatgttggatcttgtgacattgtgctaaactcttttgttcaaaggcgtcttcaagttcaccgtaaacacggtagttggtatcgcctaattgagcagttaacttgttaagccaaaaaatcttgctcaagttaaatttaggagtggtttgccaagcttcaggggtagtagtgacattagtatagaatggcaccattgagttaaaggtgttaggaccaaaggctaaccattgtacacctgcaatttctgcaggaacatcattacgaatttgcaaaatatgggtttcaaagtttctgttaataccgataggacggaaggtcttcttttgttcaggagtaccttgatcgccataagcatcgtaaggagtgtcttggtagtgtgagctttcggcccatttaatatcttcaattgagattaaacgattagcatggcagataaaaggttgatcttgatctgctggagtgccaccaaagtctggatcgaaatagttgtgaatataccaagcacgaggattattgtagtgagcatccttaatagttgaagaaccaaagatgtggcgcatgttgtagccttcacggtctggattcaagtgatattcttcgattaaatcctttaggtctgctgaacaagcaaaattatcagaatcgttgaagtcgaaagtatcaatattcaaacggtttggtgcaataacatatgcatcatctgggatacggcgtgcaatccaatgatgaccaccgatagtttcaaggtaccaaatgttatccttatcagaaaaggccataccgttcatttcataagtaccgtatttttcaactaaatagccgacacgtttaacaccgtcaaaagctgagtgcaagtatggtaaagtcaaagtgacgaaatcttcttcaccaagaccaccttcacttggatcaagtaatgggtcaacaccttggatgcgtgaattagtagtgatggtttcagtagcggtcatggctacattttcagcgttaattccagctgcgccccaaataccatttttgcctgaaacatcaggtgctgaagtatagcgtaatggtgtttctgctaaatcagcgtcgtcaatcttttgtttagaaattacactagtgtagtgcttaggttggtcagctgggttaacagctttaaagccttcagggatgatgacgcggccaccgtcttcactacgagcgatcatcgtagagccatcaatagttgcttttttaccaactaaaatagtagtacattctgtttgtttcattggatcagtcctttactttatatttatgtttaaattatttcctaataatattgtatgcaaaaataatccgataagccaaagaatataattaatttccccgaaaggcatttggactaacaccgctatagcgtttaaatgccttggagaaggtaaattcatcgccgtagccgacttttttggcaatttgctttagattgtgtgtggtattagttaattctttcttagcggcttccatgcgcaattgcatgaggtacttttgcggcgataatttagtgttttttctgaacaaagcatataaaaagctgcgtgatactcctagcctatgacagagttcgacaatattgcaggtaggatcggtataattttgcttgagatagttaatggcaatttgatactgatcatttttcgatgttttgcggactggtggatggttaggaaagtcttttactagatgataaaaaagttgataagttaaagctgaaatttttaaattgtttaataaggtctttttcttcgccaaacattgataaaggtcatctagggtttgataaaaggcagttttttgaatttgacgcaagaaatttttattaggtaaatttgatgccttgatgctttcattaacgccgttgccagctaggccaatccagaagtattcccagggttcattgtggtcagcttgaaaggaacaagtttgactgcgtggaacgtaaaaaagatcgccagcttttaatttaactgcgtggtgtctactagaagtaaaggtaccagttccgctaataatgtaataaaaaatatcgtttttacgaagattgtcaccttgaaagaattcatcgggctgacatttttgtcgaccataaaacatgatgtagctatcaagattttggttatttaagttaggcatagacttcctcactgttgaaaaattatgttacttctattatagaagagattttgcttaaaaggtgaagaatgaaaaacgaccacattaagcggtcgttcgtgaatatttatagaaaattatgatatgtggaattataaaatgaaaaggtattttacttattggcaccacttcttccattgaataaaagattgagcagagttgcacagatgctggctacgacgataccgttgcctaagaacaattgaatggtttgggggagagtttggaagatttgaggatagacagtaacgcccaatcccatcccgattgaaatggcgacaattaaaatgttgcgattattttcaaaatcaactttagttaacattttgattccttgaacggcaatcatggtaaacatgactaacatagcgccgcctaagactgaatctgggatgatagtaactagagcaccgattttaggaagtaagcccatggccattaataagccagcagcccaatagatagggcgcttggttttaataccggataattgaagtaagccgacattttgagaaaaagtagtgtaagggaaggtgttgaaaagcccaccgaagatttgtgctaatccttctgcacgataaccttttttgaggtcttcttcggtgatatcttgatgaagtaggtcgccaatggcaaagaagacgccagtggattcgaccaaggaaactaaggcaatgatgatcatggtcaaacaagatgaccattcgaattcaggaacgccgaagtagaaaaattgaggtaagtggaaccaagaggcttgtgttacgggtgtaagtgaaactaatcccatgcaaccagcaatgatagtcccagcaattaatccaattaaaacagagatggagcggagaaatcccttagcccagacttcaatgacaacgatgatgaggatggtgataaaggcagcaataagattttttgcatcaccaaagtccttggcttgggcatttccgccacccatgttttgaaaggccacgggaatcaaagttagtccaattactgtaattaaggtcccagtaactactggcgggaagagttttttgatttttgaaaaccatccggcaattaagaaaacaaagattccagcaacgataatggcaccatacatggtgttaattgaaaatttttgcccgatcatttctaagggagctaccgcttgaattgcacagcccaaaacgactggcaagccaatgccgaaatatttattacggaatagttgaattaaagtggctaaaccacacatgaagatatcaatcgaaactaggtaagtcatctgtgtgctattgaagtgtagtgccgtaccaattaaaaggggaacagcaactgcaccggagtacattgccagcaaatgctgcaaacctaggacagcagcttttttgtgactaacttctttttgtgccatttttaattattcttctccctcgaagtgtacttgatcattttcaaagctatcgatttttgctagggcttcaaaacgtagaccttctttttctacccattcgcttccgccttggaaggtttttgcaacaacagcaccaactccaacaatgtcgcagccggcttgtttagcaatgttaaccatgcctttgactgcttcaccgtgggcaacgaagtcatcgatgattaagatatgttcgcctgggtgcaaaaatttctcttcaacgcagatcttattgttgaccttcttggtgtaagaaaagacgtcagcccaataaactgcatcattcaaagtagacggctttttctttctggcaaagatcattggcacgtgcagttggtaggctgccatgacaccaggagcaatcccggacgcttcacaagttaagaccttatcgactttttcatctttaaaaaggcgggcaaattcttcaccaacatgcatcattagttgcggatcaacttggtgattcaaaaatgaattaattttaagcacatttccaggtaaaacttcaccatcttgtttaattcgatctactaattccttcaatattattctcctcaagaaagaaataaggacttcttctacctaaaacaggtaaaagaagtccttaagattattcttaactttcattcacctatagtccggtatttacggtaccgggtagagactgtcgaccttatttcgacgatatatagatatttgtgttggcttaatcttaacagaatatattgccgaacacaagtggaaaattaaggattaatgttcgattatagtaaaaattattcagctgcgatatcgttatggcacagactgatgatcttttcgataatgccatataagatccccgcgattggccagatgatccagctgcgttcccaatcattggtaatgaagctatatcctagataaagtaagactgctattaaccaatagagtgtggcgtatttgttcataatcttgcgacagccggttaattggattgttaaattgcccaggtcaagcataatagctagggcagtagaaaagcaaaggatggctggactgcgaataattaaactaatggctaaagcgcgaaggctggcacttttttgagcagctgttaagtagccttgctcttgttgatcagataaaattggcaattcttcagttaagttattatctttgtggtttaattcaaaagaaggtgagccgcttttgagtaaataatcggtggtcactccaaataattctgataaagctacaattttttcaatatcgggaattgattgttcactttcccatttggatacagcttgccgactgacattcatcttttcagctagtgcttcttgaaaaagatgatttttcttgtgtaatgccgcaattttttgacctaatctcatgattgatcgtcctttcgttttgaaataatttgatttaacgaaaatttgcggttgcagaccaccactttttaattgcatttagcgcaactagtagttgcaactgctggttgctcaagataaaagccgaacaatgaatggctatttttaactttttgattgacctttttaatttttcctagtagagttagttaaaaatgcgtaattgaaaagagggagtaaatagtggctaagaatctagacgattttgataaaattattgtgcttgacttcggtagtcaatataaccaattaattacccgccgtattcgtgacttcggcatctattctgaacttttaccacacgatctttccatggagaagattaaacagatcaatcctaagggaatcattttctcaggtggtcctaacagtgtttacgataatggtgcattaaaggttgatcctgcaatctttaagttggatattccaattttgggtatttgttacgggatgcaattaatgtctcatgacttaggcggtaaagttgaacaagctgaaaacaaggaatatggccgcgccaacattacggttgaagatccagacagtattttgttcaatggcttgccttcaaagcaatacgtttggatgagtcacggtgatttggtaactcaagctccaaagggcttcgaagtaactgcctcaagcaaaaactgtccaattgctgcaattgctaatccagataaaaagttttatggcattcaattccacgcagaagtgcgcaattcagaatacggtttagacatcttgaagcactttgcttttgaggtttgtggtgctgaggctaactggaccatgaacgacttcatcgacatgaaggttgatgatattcgtaaggaagttggcgacaagaaagttatcttaggtctttcgggtggtgtagattctagcgttactgctactcttttacacaaagcaatcggcgatcaattaactgcaatttttgttgatcacggaatgctgcgtaaagacgaaggcaatcaagtaatgcaagccttgaacaaggatcttggtgttaacatcattcgggttaatgcccaaaagagattcttagacaagttgaaaggtgtaactgatcctgaaaagaagcgtaagattatcggtaaggaattcatcgaggtctttaacgaagaagctaagaagttaaaggatgtagatttcttagctcaaggtacgctttatactgatgttatcgagtcaggtaccaacactgcccaaacgattaagtcccatcacaacgttggtggtcttcctaaggacatgcatttcaagctgattgaaccactgcgtaagttgttcaaggacgaagtacgtgaacttggtgaaaagctgggcattccacatgacttagtatggcgtcagccattcccaggccctggtcttggtatccgtgttcttggtgaagtgactgaagacaagcttaagattgtgcgtgattctgatgcgattttacgagaagaaatcaagaaggcaggtttacaagaaaagatctggcaatacttcactgttcttccaggtattcgctccgttggagtaatgggcgatggacgtacttatgactatacgattggtattcgtgccgtaacctcaattgatgggatgactgcagattttgcccaaattccatgggatgtacttggtcacatttcagatagaatcgtcaatgaagtagataacgttaaccgcgtagtttacgatgtgacgagtaagccaccttcaactattgagtgggaataatttcgtaccttaataagaagaggaaatcccaatatgacggcatttgaatagggtcaatattagtggaaagtaccggttgaaagcaagttgtctaccgtttttctaccggtagaagttgattttaatcagcatgaatagtgcattaaacgctactattacctgttcgttattttggggttgtctaccgaaaattgaatattttgcttacttttgttgaaaagtaagtgactgttgtcctacttattgtcatttgataagtggggcattttttttctctttgttgccacaaaagaaatgctgaaatccaaacggagcagtctgtttgatcgttgttgttacttatgacgaaaacataagtaaatcagatatgaaatctcgaaatgaccttgaatgaaatctcaaggtactcattctcgaatgcaatatctgatcggtcgcaaccgaaggctgaaaatttattttgccgggacggcaaacatgagggggtcattgcacgatgaagccgttaaaggatgagctaattcaaagtcgacttgatgaagatgaattagcagattttgataaagtgaagaaactgctcgatgtgaagagtaattctgttgcaattcggcagatgattaaagatgaaatgagaaagccagaaatgaatggaagcaaggtaatactgacgttgtatcagcgttattaaccaagctgtctgatgaaggtcgcctaccattgtcagaggcgttgatgggtattacaggtactaaaacatcatcacaattgagtatcttacaaaatcagttcgccgatattcaatcacagttagaaagtattatgtattcagtgacaaaaatggtcgattgaacaagtggctcatgtagttagaatcgcctacaagaccatctacaactggattgagcaaggagtattggatattggcgtggctgatttacctgaccatggaattcgccgccgacgagccaaagaaacccgtgggacttttagccatggacgttccattgaagatcgtcccgctgaagttattgaccgtcatacctcaggtcactttgaagcagatacagttttatctggaaagcgtaaaggtcaagcaatagctacgtttgtcgagcgtaagagtcgtcttatcatcgttaaacggcttcagggacgagatagtacctcaataaccaaggccattttagaattagctaaccagttagaagataatctcaagccccttactgttgaccatgggaaagaattcgctaactacaagctaattgaaaagcaggccaggattcccctatactttgcgcatgcttattctccacatgaatggggcagtaatgagaatcgcaaccgagtactacgacgctttatcccaaaggtcaaccgattgagaaaatcactgatgatgagttaattcaaattaactcgtatttgaactccaggccactcaaatgcttaaactggcgcacgctaattgagatctttttgcgtaatctgcgtcactaactttgttcaagttatttcttgcaatctgccgtttgaaaagagattagccttggcggttagtctcttttactatctggtaagttgactgcaaacagaaaagagagacaagcggtcgtcaaagtcgctaaaccgtgctataatgttatcggattttaaaataccactagttattaaatttgggaggcaagaataacgatgaagcgacttaaatttttagaaactaaacgtacaccgcgttatagtctgcgtaagtttagcgttggtgtggcttcggtattattaggagtaaccatttttggaattaactttacaggtcattctgtaaaggcagcaaccacagaaagcgttgaagattccaatagttcagcaaacagtaggttgcaacaaactaatactcagaaagaaactagtgcaacaggaaaagttcaacaaagtagtgcaagtaacgatgtaacagaaaaagttcaacaaactagtgcaagtaacaatgcaacagctaataattctacagaagctgcgacaacctcacaatctgcaccaaatacgcaaggtagcgctcacactgatattaaatcattagcagctaaatcagcagcaaaattagcagttatgaatttaatggcagcttctggtactggtactaatactggtactggtactgacagaaatgcaggagatacagtagatcaaaataacattaatgatcagccagctaaagaaaatcaaaaattggccaatgagcataatctaacttcttcagataactacagttctaatatctatcaaggtaaagataaaaattattacaaggttgtaactatttatggtaatgactacgtttaccatgctgctgatattcaagctaatggtactgctcgtgggcaatgggcaacgacagctgaagatactaaaaataatatcaatatttctaaagaagatttaggacatggtaagacccgttggactgttgttttcttccctaataagggattacaaaatgttggcggtaaagtaaatgggttagtttctgcaaaatttggtattgctctcactaatgactaccaaatcgttggtaatgttgatatggaagtaaataatgagactaatcaaaaatatatatattataaatttgaggatagtagcaatagccctactagcattacagtacaaaatccaccagctgaagtagacttttcatttaatcctaacacagatgttgattcaaatactggtttaattaatagtaaaaccttgccagcttataacaataaatatttgcaaggctcatactatttcactactgctactaatgctggtattaggaacttatggcagacttactttgaagatgctgatgaacgtaataatgcatatgatgggtcccccttatctaggtggcaatcatgactttcattttaataattttataattaaaaataaaactggagttgacggtttagaatctaaggaccttaaggaccctaaggcccaaatcccaatcatttatgacacactgggggataggaagtttaacagtgaagctaattctaagggcgtatttagcagtgataactttaaccaagcaatggaatttaagtcacaaggtgacgcaagtaacgtttttattgatcgatcacaatattcttcttatgttatttcctttactacgcaacacacagactctcatgaagtagaattattttcaggtccgaaaaatcaacaattctcaggaatctcagctaatatttattcctatcagaatggtcactataatatgttttctagattatatggtgagcagagagcactggatgcagctggtgcagtagtaaaagctaaagatatgattcctggttgggttgatgccaatattgctacggctaagattcatactgactatttaaataatgctcaaatttatgctttgcgttataaaattcaaaataacgttacagactctaatgctttaaataacattattacagaaggaaattccttaaacgatgctatgaaaaagcttggtaatagtatcggacagtatgattctgatggcagttttgctgatcataaggaagatacaacaaaggaatctgatcgctataaatacgcaaatccagataaaaaggcagcttatgacaatgcaactgaagtaactaaagctttgattaacaaagatacaggtgcctatgcagatcaagcgacggtagaaaagcttactgaagctgaaaataaggcttggaacgaacttaaagttgtcctagcaaataagatcacaccaactgttccagcaaccaaggaaccagtagcagataccagccacttaactaaagatgaacaagataaagttcagaagaatgtggaagacgctaataagggtaacttcccagaaggcactacagttacagtaggttctgacggtacagctacagtaacttacccagatcagtcaactgatacaatcaaaggtagcgatttagtacgtccaacggaagataaagataactacgatccacatggaccaaagaatccagatgacagagttccagtaaaagatcaagatcatttgactgatggtgaaaagaacgatgttaaggacgaaatagggaaagaaaacccagatctaccaaagggtacagaagttgacgtagatgataagggtaacgcaacaataaaatatccagatggttcaaaggacaccataccaggtgaccaattagttcaaggccaaaagggcgacacaactgatgctggtaacattacgccaactgttccaggtgacaaggtaactgttaaggatccaagtcacttaactgatgatgaaaagaatcaagttaagaacaacgtcgataatgtcaacaaggataagttcccagcaggcacaggtattacagtaggcgatgacggtaccaccacagtaacctacccagatggcactaaggacaccattccaggcgatcaactagttcaaggccaaaagggtgacacaactgatgctggtaacattacgccaactattccaggtggcaaggttactgttaaggatccaagtcacttaactgatgatgaaaagaatcaagttaagaacaacgtcgataatgccaacaaggataagttcccagcaggcactgaagttacagtaggcgatgatggtacaactacagtaacttacccagatggttcgaaggatgtcattgctggtactgatttagtcatcgctgctaaaagcgatgatgttcctggaagcaagcatcattcacacaagaatggttcaaactctagtcaagttgatggagttaagggagcttctactgctaatggcagcatcgcaaacgctggtaacaacctaggtgttaagggtgaaagagataatgctattggtaataacaaggctactagcttaaagacattaccacaaacaggcactaaagatacttcaattttgggtgtgcttggtatgcttttagcttcacttggtctattcgtatttaagaagaagcgcgatgaaaaataatttataatagttttttataaattctattgataaacatatctagagaaagttaattctcagatttaaaaagacgatcgaaaacttttgaaaaattgtttttgatcgcctttttgtgtgaaatgaaaacaagattctacgtaagcgtaaaataaccgagtatctagattagttttagatttcaattatgattaatttatcaatattttggaggttatttatatgtcagaaaaaaagctaatcgtccctcttgctcgtgagccaaaagctaaaaagtctaagccagctcgtaatcatttactgctttctttaaagaaaaatgacctagaattagacttccaatgtcattaagttaagctattgacttttgaaaactgatctttttaggaattgaatcatttggattcgattcttttttttgcaaaaataaaggcgaaaagacaaacgaaatttaaaagccaagtctgcagtatattacatgtatcgcgtggcctaataaaaaagaaatacaaactacgcttatttggcgtacacaaaaaagcatcaaattggctatctaaagccaaatgatgctttaattgtttttttctccaatgtcaatagcttaacttaatgacattgattaaatttgcgggctttatttatttttatattgccaacccaacaagcgagaaaataatttcactaattagtactaatagaacatttactaagatgcctgtaaaggttgattctttatgtggattttttacgaaagtcttagttgtgtggtaaacaagcggaatagtaagtaaactccctaaagtaataattggcaaatattttaatactattcccaatattaaaaagatgtaggctaatacatagtaacaacataaaatagtcagggcagtttttcgacctgtatagtatggcaaggttttacgtccgattttgacatcttcagccacatcgcagatgttgttggctaacatgacattggcaatgacaaaaattgccggtccagcaacgataatggctttagcccagaaaaaattatcgaagggatgcacgttatacatgttgatatataggcctaaaaatgtaatgttgtagcccattgtaattcctgaagctggttcaccaaaaggagtttttaaaatggggtaagggccacctgagtagcaatagccgattagatagcttaaaatcccgattaataaaataatccaaccgactttaatgctaaggatagttccgataattacagaaattaacgtcaaaataatgattatttttcgagcccagcttttcgtaatattaaatttctctaggatattgttgtagctagttatatggttttgcttataacgtgcgtaatctgtgtattgattatgaccattaactgctaaatgaaagcaaatcacagctaaaaatagccataatgaatagactagattaaagttgtgataatagtagctagccatcaccgagccgataatatatggcagagccgagataataattgtttggatttggaccaaggcattgaatttttgtagtgtagaatattttttcattggttcctccataagtattaaatagccattatcttcagtataaatagatagttataatttacaattatcttgggtagaaatcttattgtttagaattaagaaagcttaatattattttttgtggtggtcgatgtaagtcagcaaagccaacaaaagcatcaaaaagctactctcgtaaaccgacatggttgaactctttctgtagtatgttgaccattgttaaaaaaggtgaacgcgtaaaatactaaatttttactctaacaaagtgtctgggaaaaagtttatttttaattaattttagactttcactcaaaaaaatcctaataaatcaaggtttattgataccaagatttattaggatttcttaatttctgagtttttcccagacactttatttagactattttcttaacttgtgcaccttatgggctagaaccatttctttattgcgatcttcatagatcatatccttgatgtaattccatgggattaacaaaggcgttttgctatttttacggaaaatgaagtctgcgtgtcgtctttccaagtgacgcaaatatcttttagcattttgaatcttagtatggtgttccaaatgcaatcgtggttcgaaatcgacgattttgtgttcagcgttgaaaataggtctaactttatggtgccagttctcagcactagagatatgatcgctgaccttttttccggcttctacgatattctctttggttgctggacttttctgatccttaaactccgcatgtggatctagatagtagttgcccaaaccatcttgacgataaagtcgtattttcttgaatgtcttatttttcttatccattcttacttcgataacgtcaccatttttgtgattcattaaatacatgtgatgttttctagtgtaatttgcacttttcatgatcagaaatctcacctctacattaattattctgaaacgatattataccagtattttaactatatttttgctttacgagtataaaagtttataatttttaaaaagaaatttcaattcttgagaattagagaaggaaaaaagagactgtaaaatagtttgtgtaaggatgaatgattccttaaatttatttctttaaacattagaaaaaggagttcctttctcgtatgattggtttgaacaaaaaacacatacagaaagaagaactccttcatgaatgattttaccaaagattttgctcaagctctattcaatccagacaaaataaatgatttattgcgcaaagagctacaacaggctgttaataacttgctagaagctgaattgactgcctttctgggctatgatcccctatgccagaaatggctggaatactggcaactctagaaatggtgcttatttccgcaaagttgatacgcaatttggcccaattgaagtgcaagtgcctcgggatcgcaacagtcaatttcatcagcacacgctgcctggctacaagcagcactcggatatcttggaaagcatgattatcaagctttattccaagggcgtgaccaccagggaaatagccgatctaattgaaaaaatgtatggcagccattacagtccagctcaggtatcaaatatttccaagcagatgattccaaaggttgaggcttaccacaaacgcaagctaagcgacaagtttttctgcgtctatttggatgcgacataccttcctttgcgccgagaaacatttgagcgtgaagcagtctatattgccattggcatcaagcctaatgggcacaaggaggtcattgactactgcattgcacctagcgagaacattgaagtctggacagatatgcttcaaaacatgaaatcccgaggcttaaagcaagttgagctttttctttctgatggtgttgttggcatgaaaacagccttggccaggacttatcctaaagctcattttcaacgctgtttggttcatgtcatgcgcaatatctgcgctaaagtacgcgtcgacgatcgtgaaaagatcatgaacgaattcaaacaggtgcatcaacagacaaacaaagaagaagccacagctgtcctgcatgacttctataccaaatggggcaaggtttacagccatgttatcagaagcttgaaagacatagaaccagatctgctggtcttttataactatcccaagcagatcagagcttcaatttattcgactaacatgattgaatcatttaacaatgtgatcaagcgcaaagctaagcctaaggcagagtttccaactgaacagtcgcttgatacttttattggcattcaggcaatgagctacaatgaccgttatttcaatcgaattcataaaggctttggtcaggttcaggacaccttagaatcctactttgattaaataaataattaaaaaatcaatttacgagaaagaactatttacacaaaagatttgacagtttcggaaaaaatcctaatgaagaaacttaatatattttattatgctaccatttggagttttattattggaatatgctgtgctacatatttaaacttaattaattttattattaattttgtctggcatgttttgtttgataaattacctgttcctagtcaggctttaccgttttttatttgtattccttttggtttcattattggtatattaattaagcgtttaggatcatatccattaactatcgaagaagttttaatgagtgttaagcaggagggaaagatcaattatcacaattggtggaaatccttaaccttaggtcttatttctttagccgcgggtggcagtattggaccagaggcttcaactactgtactaggaagtggcatggttaattggctgggagatagattacgactaattgcttattcttctgattggaaatggaatcatttttgggatactatcgtttcgaaaaaacaactaaaaaaactgccaaaatttagtagcctttttaaatcaaaattgtatcaaaaagttttttgcttaattatggttatgatcggcgtggttggtgcagcaatagtctttaaattattccctgaagaaggattatttggtattcatcatcgccatattctctggcaatggcgctatagtatgtatgtaattattctattaattgtaggttggagcttcggtatgtttttcttatggagcgaaaaatggagtgattattttgctaaaaaaattactatttcaccgattattaaagcaactatatggggaatagttcttgcattacttaccttaattactagttatgccctgtattctggtgaatttcaaattgttccatttgtacaccaggcgttgcaaatctcaccattatttttgctagttatagcagtcatcaaaaccttgtctactaatataggttttagtttaggctggcgtggtggaaaaattttcccttcgatttttgctagtgtagcagttggcgcagcgattgcgcaatttttaccaattatgccagttatgtgtgtagccattacagttagtgcaagtattgcagttatcttgggtaaacctttattaacagctattttattgattctgttattaccaatagagttggctcctgtcattttagtaagtgcgtatttatctgcctgtttgacaaaagtgagctatagttttagacaaaagaataattagggaggtatttttatgaacgaaaaaaacgatgcagtaactggtgcttctttgatagagaatcaagaagaaaaagtaaaaagcccatggccgggtcctaaaggtatgattcctgtaacaagtgggcgtgctgacgatgctaatgtacataatcgtgcctacttagacaatatcttggtggagatgcgtttgcttgattcagttgagccagacttaacaactgagatttttggtaaaaaatatgcctcacctttaactctggctgcagtctctcatttgaacagggttttaccagataagacgcgtaagccaatgcaagaaaaggcacgtgcggctaagaataccaatactttaaattggattggcatggagtcaaacgaagaatatgccgaaattgtcaaagagggcggcgatacagttagaattgtgaagccttacgcagaccatgataaaattatgggcgaactaaaacaagcagaagaattaggtgccgtagctgttggaatggatattgatcatgtgcctggtgataatggtaaatatgatgtagtcgatggtattccactaggaccgatttcatttagcgatcttgaaaagtatgttcatgcagttaaactgccgtttgtggctaagggcgtgctatccgtgcgtgatgccgttaaggctagagatgctggtgccaaggcaatagttgtttcacatcaccacggccgcgttccatttggcgtgccgccactaaaagttttgccagcaatcaagcaagcactaaatggcagtggaatgaccatttttgtagatggatcattgatgactggctacgatgcatacaaggctttggccttaggcgcagatgctgtactgattggtcgcgggattctttctgaattgttaaaagacgggcaaaaagcaacagaagataagattaagaaaatgaatgagcagcttgcacaaatgatgttatatactggcgttaaagatactaagtcatttgatcctagtgtgttacattttgattaggatagaaaaatgaaatagtttattttttacagtttactataattaagtggctattagcctataataaaggcgtttaaagctatactgaatagtgttatgcttaactcggacgttgttataaggtaattatttaaaagtaattagttgtatacgaaaacatgcttagctatggtaaaagctaagcatgatgtctcataatattgagccgcttgtagattatactacaagcggttttattttagatgaaaataacaagttttcaaaaagtgagtatctatgttttgctattatggaaatggattgatttagaaaatgatgctattgaaatttcattatgagcggggatgcaaaaccttttttaaaaagcataagaatgagcaaaagataattaagcagttaatcgatcaagcgattactaaggaattggcaactggtatgactaaagtgaagatcgctgcaatgactcggattaagggaaaatcaatttacgagtttcgcctaaatttgaaaaaagcgggttcagcgagagtcgcttttgcagtaaaggatgagcaagtactagttcttttgattacctctaatttacagaaggatagttttagtcatgaattagaaactgttctgaaaggaagtcattatgcgtttaattccaattaagcaggcagagactttgctcaaaaaaatgtgtagtaataaaagtaaatatgtagaaattaaattattaacggcaaaaaaggatcgttcaattagtgtgaaaaatgatggtaaaaagctaattttaactgaagatggctatttgaactttacgcaggaatatgaattgactgatccagctgttggccgtcatgcagttttagcggcttttaaaaaggaatttccgcgtagtaatcgtgcatatctgattgctaaatagtatactttaactataagaaaaactatcagtgttgattagaaaggaagtctttttatcaatgaaatatgcagaaaaatctcccgcattatgggatgccattcatcatgaagaacagcgccaacaagacaccatcgaattaattgcctctgaaaatattgtttctgatgcagttcgtgaagcacaaggttctgttttaactaacaagtatgctgaaggatatcctggtcggcgttattacggcggttgtcaatatattgatcaagttgagcaactggctattgattatgcaaaaaaattgtttaacgcaaagtttgctaatgtgcagccacactctggatcacaggctaacatggcagtttatcaagcacttttgaagccaggtgatgtcattttaggtatgggcatggatgctggcggtcacttgactcatggatccaaggttaacttcagtggtaaggaatataagtcttacagttacggcctaaatgttgagactgaagaactagattttgatgccattcgtgaaattgctcttaaggttaaacctaagttaattgtagccggtgcttctgcgtacagccgcatcattgattggcaaaagttccgtgaaattgcagatgaagttggggcatacttaatggttgatatggctcatattgctggcttagtagcaaccggtcaacatccaagtcctgttccagtagctgatgtagtaactacaactacacataagaccttgcgtggccctcgtggtgggatgattttgtccaacaatttagaaattggtaagaaaatcaattccgctttgttcccaggcattcaaggtgggccacttgagcatgtcatcgcaggtaaagcgcaagcattttatgaggacttgcaaccacaatttacagattatattaagcaagtcattaaaaatgctaaggcaatggcagaaacttttgctgaatcggacaatattcgtgtcgtatctggtggtactgataaccatttgatgattatcgatattactaagactggtattaccggtaaagatgctcaaaatttactcgactctgttcacatcactaccaacaaagaatcaattccaggcgatcaacgttcaccatttgttactagtgggttgcggattggtacgccagtaattactagtcgtggctttgatgaagcagatgctaagaagactgcggaaatgattattgaaattttatctgatccagaaaatcccgcaacgattgcccacgttaaagaagaagttcaggcattaactaaaaaacatccaattgaataatttgtgtagcagaatttagccgtcctagttctcagctggggcggcttttgttataataaaaaattaaaaataatggagttaagagtgaaggaaacgtgattatttggaaaagttaaaaagacataaaataggcttattttcagcgattatgctggccttgaattctttaattggttcgggctggctttttggttcaggttctgcagcacaaattgcaggtccagccgcaattttatcttggattttaggtgcagtaattatcatctcaattgcattgacttatgtagaattaggttcgatgtttcccgaaagtggcgggatgagtcgatacgctcaatatagtcatgggccgttattgggctttgtggctgcttgggctaactggatttcactagtcacattggtaccgatggaagccgtagctgccgtgcaatatatgagttcttggccctggagctgggctaactggactaaaaattttattaaaaacggcagtattacttttgctggcttaggtgtggttattatttttatgctgatttttacaatgatcaattttgggtcagttaaaatcatgacccattttaccaatttgatttctatttttaagatcttattgcctactttgacgattacagttttaattgcttcaggttttcatggacaaaactttggcagtaatttacatgaatttatgccttatggtagtcggtccatttttgaagcaacttctgtttcaggaattattatgtcttatgatgcctttcagacggtcatcaatatgggtggggaattgaaaaatccgcgtaagaatattgtgcgtggggtattgatctcaatgttaattactgcggcaatctacattatgttgcaagtgacgtttattggtgcagttgagccaggcatgttagctaaagtaggctggcatgggatcaactttacctcaccatttgcggacattgctattattttaggcattaattggctagtgattttgctctacctagatgcatttgtttcaccatttgggacaggggtagcatttgtagctacggcctcaagagccctagcggcaatgacacacacacgtcatttgccaaaatggttaggtagattgaatcaaaaatacttaataccacgttatgcgatgattgctgactttgttttggcggttattttagtaagcttatttagaaactggaatttactagcaacagtaatcacggcctcaactttgattgcatatttgactggtccagttacggtaatgactctaagaaagaaaagaccagatcttgatcgtccatttaatcctggttatatgaagtggctagctccagttacctttatactaactagtttggcaatttactggtcaatgtggccaacgactattcaggtgataattgttattgccttgggtttgccgatttatttttattatgaaattcactaccaacattcaaatttaaaagaacaattacatagtagttggtggatgatcggttatttgatttttatgtcacttatgtcctttgtgggcagtagcggttttggtggtcagaactggattaagtatccatttgactttgtagtaattatcattatttctctcgccttctattattggggaattaagacagggttaaagaaaatcgatccttatgctgaaaaaattgcgcaaaataaagaataagtaaaaaaactgttgggatttttagtctcaacagttttttgttcgctattctgcttcatcaagatacttatttagcaccttgaaaacaccgttgtcgttattagtaggtgcaataaatttagcagtctttttaacgatatcttgaccattagccatggcataacttaaaccagcaaatttcaacatttcaaggtcattttcaccatcaccgaaggcaattaattcacttcttggcacgtctaaataagctaaaaattcctttagccctgcggctttatttacaccttcaggaataatatccatgtagctccaaccactagttgtgacgtggattttttctgtactacggctgttgaagccatgttctaattcatgtcgaatcttgctgggatagtccattgtgatcttagtgtattggtcatcagcaggaattttattaaaatcatcaatttcgatgctattaggataaaaataatgatgggaccgcttgtattctggtggtgtactttttaaaaagtaggagtgcttaacgccactaattaaaatgttttgggctgcaccaggatagcgtgcgtgcaaatattcaataaaatttaggatgcatttttttgaaaagcttgttgtacgaataatttttccatcgcgaactaagaccgcaccattgtcggcaacaaagtcaatagaatcgataaattcgctaaagtcatcagccaaacgaccagctgggcggccgctagcaataataaaatgtgccccgtgttgatgcagacgagttaaaatctcgctaaacatttgatgatcgtattgtttttcatcgttaacaaaagtaccgtcaacgtctacagcaacggccttaaagggaagagtagtcatctaattacctcactaaaatttgataccgttaacagtttaccatttcttgcaagtgcttacataaattatttatattatgtttaacaataaatttgaaatttacgaggtagaaaaaatgacaccatggtggaaaaaagcagttgtttatcaaatttatcctaagtcatttcaggacagcaacggtgatggcataggtgacttacaaggaattattgctcgtttagattatttggaaaatctaggagttgatgcaatttggctttcaccggtctatcaatctcccggtgtggataatggctatgatatttcaaattatgaagcgattgatccgcaatatggcacgatggctgatatggatgagttgattcagaaagctaaggagcatcatatccgaattgtaatggatctggtggttaatcatacatctgaccagcatcaatggtttgtggaggcacgaaaaagtaaggataatccttaccgagactattatatttggcgtgatcctgttgatggacatgagcccaatagtttgaagtctgctttttctggttcagcttggaaatttgatgagcaaacaggacaatattatttacacttctttgcggaacaacaacctgatttaaattggaaaaatccagagttgcggcaaaaaatctacgatatgatgaacttttggcttgataaggggatcggtggcttccgaatggatgtgattgaattaattggtaaagatcccgacaaaatgatccgtgaaaatggtccgatgcttcatccatatttgcaagaaatgaacaagaatacatttggtgatcgagatgtgatgacggtgggcgaaacttggaatgcgacaccgaagattgcagaagagtactcagatccagcacgtcatgaattatcaatggttttccaatttgagaatcaagctttagaccagcaggagggaaaagaaaagtgggatttaaagccgctagacttaggcgaattgaaaaaggttttagtaaagtggcagacagagcttgattttaatcatgcttggaatagtttgttctgggaaaatcatgatattccgcgcgtaatttcacgttggggcaatgataaaaaatatcgggtgcagtgtgctaagatgtttgcgacagttttacatttgatgcacggcacaccatatatttttaacggtgaagaaattggtatgactaattgtccggtaaaaaatattgatgaagtagaagatattgaaagtgtcaatatgtatcatgaacgtctggctgaaggttatgacaaagataaactaattcatgcgatcaatgttaaaggcacggataatgctcgtcgtccaatgcaatggaatgatgagaaaaatgccggctttactaagtcaaagccatggttgacagtaaatcctaactacaaagaaattaatgtgaagaaggccttggctgatcctaattcgattttttatacttaccaagaattgattactttacgtcatgaaaatgagattgtggttaatggtgactttaagttggttcatgatactggtgatgaagttcttgcatattatcgtattttaggtactgaaaagtggttggtggttgctaacctatctggtgaagagcaacagtttacgtcgaccgatcgcattaaagaaaacttgcttagtaattatgctgtgcgtaatgatctgcatgatattacgcttaagccttatgaagcatttgcagtggcaattaaataagctaaaattaaaaagaacttgaattactaacttgaagatgttattctagttatcgttaatcgattaatctatgatctgtgatatgatcatggcaaaggagtaataaattatgaaacaaggtattcatccagaatttcaagaagtagttttcatggactcagcaactggtgctaagttcttagctggctcaactttgaagccatcagaaactattgactacgaaggcgaaacttacccattagtacgtgttgaagtttcatcagattcacacccattctacactggcaagcaaaagtttgctcaagcagatggtcgaatcgaaaagttcaacaagaagtacggtttgaagaagtaaaccttttatctggtggaagcagtcccattggggctgcttttttcgttagagattatttggcagaatgcatgaaagacagtataatgttttctgtataaaaatgtttttatgggagtaaatattcaatgaaaatgcaaatggcggaaattgccaaggctttaaatactacttgtgaaggtgacaatcaaactgttattacttctgttgcctttgactccagaaagatcacagatggtggattatttgtaccacttgaaggtgaacgtgatgggcacgaattcatagctagtgctattaataatggtgcttctgctactttatggaaaaaggggcatccgaacaagccagaagatattgcggttattgaagttgatgatccgcttgctgctatgcaagagcttgctcgctattatttgcgtaaggttaatccaaccgtagtgggaattactggttcaaatggtaagactactaccaaggatatgattgctgctgttttgtctaaacgctttaatgtacataaaactcaggccaactttaacaatgagattggtgtgccaatgaccatccttgagatgaagccaaatactgaaattttggtgcttgaaatgggaatggacagaccaggtcaattgcatcatttaagtgaattaacccatccagatgtggccgtaattacaatgattggtgaagctcatattgaattctttggcagccgcgacaagattgcagatgctaagatggaaattactgactttttgcgtgaagatggcgaatttatcttcaatggggatgaaccattattgcaagaacgtgctgagaaattggatcaagctaaagcaacttttggttttagagatgaagatacagttcatgcaactggctttaagagttatatgcatcatgctacctttacagttaatgattcagagcaaaaattctcaatcccaatgattggtaaacacaatgtttctaacgcaatggccgcaattagtgttggtcgtcattttggtgaaagtgatgaggaaattgcctcatcattgtctaactttaccccaacggctaatcggatggagtgggaaaaaggcgatgctggagaaagcatcatgagtgatatctataactcaaatccaactgctgttagagctgtattgactagttttggccaagttgaagtaaaagataatgggcgcagaattgctgttttaggtgatatgttggaattaggtaaaaactcccctgaattgcatgctggccttgaggatacgttagatccacaaattattaacgaagtttacttatatggctctgaaatgaagaatttgtatgatgctttacaagataagtatgagccagagcatttgcattattatacacaagaacagacagatcgaatgattgacgatctgaagaatgatattaagtcggatgacattgttgtattgaagggttcacatggaatgcacctggaaaatgtcttggcccgactaagataggagaacaatttttttgaagttttcagaattaggattaaatgacgcgcttcttaaggcaattaaacgttcaggctttgaagaagcaacgccaatccaggaacagactattccccttgctttgcaaggcaaagatgtaattggtcaagcccagactggtaccggtaagacagctgcgtttggcttgccaattttacagatgatcgacaaaaaagaaaaagcaattcaagcggttattattgaaccaacgcgtgaacttgctattcagacgcaagaagaattattccgtttaggtcgtgacgaacatgctcatgttcaagtggtctatggtggagctgatatcggtcgtcaaattcgctcattgaaacaccatgtaccatcaattttagttggtacgccagggcgtttgcttgaccacttgaaacgcaaaactattaatttagatcaagttaaggctgtcgttctagatgaagcagatgaaatgctcgatatgggttttattcaagatatcgaaagtattttgaaatatgctaagaaccgacaacagacattactctttagtgctacaatgcctaagccaattttgcggataggcgaaaaatttatggatcacccagaaattgtccgcattaaagctaaggaattaactgctgatttgattgaacaatattttgttcgtgctaaagagtctgaaaaatttgatattatgtgtcgactaattgacgtgcagggtccagatttggctttagtctttggtcgcaccaaacgtcgcgtagatgaacttacgcgcggtttgcaagcgcgtggctacaatgcggcgggaattcacggtgatctatcgcaagcgcgtagaatgtcagttttgaaaagatttcgtgaaggtaagctagatattctggttgctactgatgtagctgcccgcggacttgatatttcaggcgtaacccacgtttataattatgatattccccaagatccggattcatatgttcaccgtattggtagaactggtcgtgcggggcaaaatggaatctctgttacttttgttacgccaaacgagattggctatatgagaaccattgagcaattgactaaaaagaagatgtcgccgcttcgtccgccaacagatgatcaggcattacatggtcaattaaagcaagcaaaaattgaaattgaagatttgatgaacggtgatttgggtaaatatacccaaggggcaagtgagctgctggataactattcagctctcgacttagttgcagcctttttaaagaacttggctaaagatgaggttaaagtcaagattaccccagaaaagccgttaccatacaagggtgatggtcgccgccgtcgtggtaaaggtcatggccgtagcaataataatcatggacgcgataaccaccgccgtcgtagtaacaataattcataccgccaaaatggaaaccgcggtaagcgtggtcgtggcaacggacatgaatttgtaatcaagaataagaaagattaggattttatcttaaaaagggaagttgtaatttttacagcttcttttttgtattataatgatgtcattgtgtgaggtgaaaataatgattaaaggagtaggaattgactcgattgaagttgaacgagttaagaagatcgtggacaagggggatgcttttgccaaaaaagtattaactcccaaagaatttgatcaatatcaaaaaatggcaggcaaacgtaaagttgaatacctaggcggacgcttttcattaaaggaatctttttctaaagcaatgagaacgggtctgggaaagtatattggttttcaagatgtcgaaactttatgggatgatttaggtcatcccgttatgacttcaactaagtttgatggaaatattttcccaagtatcacacatgataatcatgaaattattacatttgtagttttggaggaaaaataaaaatatggttccaggctatcaccgtccagccgttgtaaaggtaaatttgggcgcaattagaagaaatataaaaaacgaaatgaaacatcttgcaacagggcaaaagatgttagctgtagttaaggccaatgcttatggtcatggtgcagttgaggtggctaaaattgcgattgaggaaggtgcagcaggcctttgtgtagctattttagatgaggccttgcaattgcgtcatgctgacattgttaagccaattttagttttgggagtagtttctccagaatacgctccaattgcggccgcaaacaatgtttcattaacgattcctaaccttgaatggctaaaggaagcagaaaagtaccttgaaaaagagcagttacagttgaaagttcatattggagtagattcaggcatgggtcggatcggctttaacgaagatgaggattttattgctgctaataaattcttacaaaataacgataatttctacgtagagggtatgttcgcacactttgcttccgcagacagtgctgatgatacttactttaagcatcaggtagaaaaatttgctcatatgagaagtttgttgacagttaagcctaagtggattcacgtagacaataccgctgccagcatctttaacaaggatgtgcctagtgattgtgttcgttttggaattggcatttatggtttgaacccatcctctaatcctgatagtcctgacttgaagtcatcaatttcgcttgaaccagcattatcatttgagagtgaactaactcatgtaaaaactattcatgaaggtgacggagtaggatatggttctacctttgtagctgatcaagatacaattattggaactgtgcctgttggttatgctgatggctttattagaaagtttcaaggctttaaagttaaagttggagacgaatactgtccaattgtcggccgaatttgtatggatcaatttatggtcaaaatgccaaagaaaatgccgttaggaactaaggtggtcatcatttccaatgatccaacagcgccaaataatattaaggccgccgcagattatgttgatactattcactatgaagtagcatgtttgttaaacgatcgtttacctcgtgtttactatgaaaaataagttaggcaataaaaaaatgcttctagaacaaaaatctagaagcattttttggtagatcagttttttaatccttaacagggtgttcaataaagacacctggattttcatcactcataatagtcatgccggcttgcaaatcttcgatttcagaaactacgaaaccttttctttgtaacttatcaacaatcgttctcatggtaatatctgagacaccagcggggagagtaaagagtgttcttctaacaaaattaccttcgagttcgccagcagctgcatcaagtgtcattacactagacatattagtgtgcttagacacaatcttggacatcttgatcaagttaccacgtgtattgtcagataaaacggtcaaaacgtatgaaccatttttaacatcccacgcatctgacaacatatcaagcattcttgagtgagtaagaataccataaaaatgattatcttcatcaaggacagcaatataaggtaagtccttaatgttgaaaaataccttgaagaatggtgaattgaccttaattgtcttagtggcattcttaagtaagtaagttactggtagattcatatcgccaccttgtgacttatgacggtagatatgcatcttataaatgttaccacggaaaatagtaccagtatcgtcaacgattggcacacatctgtagcctgaatcttctaaaacttttaaagcttctgctaatgtggctttttcattaactgttgttaaataatcttttttaataactaaagatttaataagcatgagttcgcctccgaaagtgagaaatgtttcaagtaattatagcatagttgatgagttaattaaatattaattaaagttcatctgaagtaacaactatattttaacaatagttagacaaataaaaaagcatctccgaaaaaagagatgcttttaagtgaaacaagttttagattattgacgaaccttaacgccagtttccttaaatgccttgtccataaccttcttcaattgatctgcagaagcagtcatcaattcttgttccttgtcacttaatggcatttcaatgatttgttcaagacccttacggccaacaactgcaggagtaccaatgtgaatgtcatgtaagccatattgaccgtccataggaactgaaagtggaagtacacggtgttcatcgttcaagatagccttagcgatcattgctgaagcagtaccgattccgtagaaagtagcacccttcttgttaattatttcgtaagccatgttagcaacttccttgtggatgtcttcaagcttagattcatccataccgtgagccttaacccagtcactaacctttacgccaccaacattgttgtagctccatgctgggaattcagtatcaccgtgttcaccaagcatgtaagcattaactgaacgtgggtcaacatgttccatttcaccgataaccttttgaagacgaccagtatcaagtgaagtacctgaaccgataacacgatccttagggaaacctgacattttccaagttgcgtgggttaaaatatcaactgggttagcaacaactaagaaaataccttcaaagcctgattcaacaactggttcaacgattgatgataaaatcttcaagttcttgttaacaaggtcaagacgagtttcgcctggcttttgtggagcaccagcagtgataactactaagtctgcatccttacagtcagggtagtcagctgcatagatattctttggtgaagtccaaggggtagcatcagctaagtcaattgcgtcaccttcaacgtgttccttagcgatatcaataatacccaattcttcggcgataccttgttgtaccattgagaatgcgaaggttgaacctacagcaccatcaccaacaagaataactttacgaggtctttcatctcttggcataaataaaaatctccttttttattagtgatatttttaacaaaatgaattataccatgatagcaagcattaataaaattattatttcctaattgtgctattatatgtaagattgtgtgcatagtgaggagtaaaaataatgaagataattgcaggtttaggtaatccaggacaaaaatatgataaaacaaagcataatactggtttcatgacaatggatcattatttgaatgaaaagggtttgtcactggataaagataaatttgaaggtcattggactaagcaaaaaataaatggtgaagatgtaattttgcttgagccgcaaacctttatgaatgaatcaggtcgttcagttagtcaagtggctaacttctttaaggttgatccagcagatgtgctaattattcaagatgatatggatatgccaattggtaaaattagaattagagctaatggcaaatctggtggacataatggaattaaaagcatcattcgagatttagggacggaaaagtttaatcgtttgaagattggtattcgtcatccgaaaaatgcaacggttgtttcatgggttttgacaccatttaatgatgaacaacaaaaattgatggatgatgcatttgcgataagtgtagatattattgacgactttatcagcggacatggtagtcaatatttaatgaataaatataattaaaatgcgtttaacagagattttagataaagatcaagatttaaataattttatttcaaaaacaaaacaagtaaaaaattcactaatcactggcgctaatgccggtgcttttagtctattgctaaaacagataacaactaaattagcagctccacttattttaattgaagaaaacgaaagtaaagcacaaaacttatatggtgaactcagtgccattatggcagatgaaactgtgcaaatttttccagtagatgctacaattgcaacgcaaacggcagttagttcgcctgatgaactgagcagccgaattcaggcacttaattttttgttaagtggtaaggcaggaatagtggtaacaacgccgcaggggctgcaatacaaactgaccaatccaactgattttgcgcaggcaaagcggagttttgagccaggtcaagaatatgaactaaaagaactcaatgaatggttgcttgcttcagggtatcagcgtgattctttggtagcacgaccaggcgaattcgccatccgtggtgatattttagatgtttatccactagatcgagaaaatcccgtgcgaatcgaattctttggtgacgaaatagatacaattaaggaattcgatttagctagtcaacggagtcaaaaagagttagacaaagtagaagttgcagcagctcaagatcgagtttttactaaggatgcaattgcggcagcggctaagaaaattgaacaagatatggccagtgcaccagctcccgctaaagctgtcaaggaccactttgcggcagttcttgatgaattaaacgatggcggtttacctaaaaactatgctttcttaattgactatttgcttgaaatttctagtagtttactcgaatatttgcctaaaaatgggcagattttatttgacgatttgcctttaattaatcaagcggttgaaacagttgataagcaaaacgctgcttttattaatgatgaactaaaaactggtgcaatgttgccagggcaaagcttgcggtcagattatacaaagattctgagcaaagataagcaccatcgtatttatttctcattgtttcaacgaagcatgggacgactgcgcttaggccagatgctcaattggtcaacacgtgagccagaacaattctttagtcaaatgccgctgattaagtcagaattagaatcttatcaaaaggcggggcaaaccgtcattttacaggctgataatgaaaaaagagcacagcaaattgatcaaacaatggttgattttggcttaaatttaccaattgttggtgcagacgaaattgttgaacaacggacacaaattgtagttgatggctttgttagtggctttagtttaccaacagttaaattggtatatctaacggagcgtgaactatttaataagcgcccacaacgtaaaaaaagaattaagacactggagaatgcccagcgtttgcgcaattatactgaactgaagccaggggattatgttgttcatgttaaccacgggattggtcggtttgaaggaatcaagactttagaaaataatggtaccaagcgtgactatattacgattacctaccagcatggtgatcagctttttgtaccagcagatcaattaagcttagtacaaaaatacgttggttcagaaggtaagacaccacatattaataagctaggtggtagtgagtgggctaaaaccaagcgtaaggttcaatctaaagttgaagatattgcggatgatttgattgaactttatgccaaacgtgaatcagaaaaaggctttgctttttcacctgatgatgatctacaaaaacaatttgaagatgcctttccttatccagaaacacctgatcaattgcgatcggttaaagaaattaagcaagatatggaaagctcgaagccaatggaccgtcttttagtaggggatgttggttttggaaaaactgaggtagccttacgagcagcttttaaggcaattcaggataataaacaagtagcctttttagtacccaccactattttggcgcaacaacactatgagacgattcaagatcgcttcaaagatttcccagtcaatactactatgctatctcgttttcaaacgccagttgaatcaaaggaaattattgaagggctaaaaaatggcaagatagatttggttgttgggactcaccgtattttgtctcaagatgtaaaattcaagaatctaggattgttaattgttgacgaggagcagcggtttggcgttaagcacaaggaaaagttaaagcagttgaaggcaaatattgatgttttgacattaacagctacgccaataccgcgaacgcttcatatgtcaatggtaggtgtgcgtgatctctcagtaatggaaacgccacctcaaaacagataccctattcaaacttatgtgatggaacaaattcctagtgtagtaagggatgcatgcttgcgtgaaatgcaacgtgatggacaggtcttttatttacataatcggattagtgatatcgatgaaactgtcgaaaaactgcaggaattgatgccacaggcgcgaattgcagctgcccatggtcgaatgagtcagaatcagttggaagatattctttatcgcttcctgaatcgcgagtttgatatcttggttacgactacgattattgaaacaggaattgatatgcccaatgtcaatacaatgatcattgaagatgctgaccactatggtctaagtcagttgtatcaattgcggggtagaattggccgtagtgctcgtttggcttatgcttacttcttgtataagccaaataaagttttaactgaggttggtgaaaaacggcttgatgcgatccgtgacttcactgaactgggttctggtttcaaaatagcaatgcgtgacttatcaattcgtggtgctggaaatatgctgggtgcacaacagcatggctttattgatagcgttggttatgatttgtactcacaaatgctggctgatgcaattcaagaccgtaaggggaagacaacaatcaaaaagtcaaacgcagaaatcgaccttggacttgaggcttatattccagattcgtatatcggtgatcaagaagaaaaaattgaattttacaaaaagattaaagccgtctcaagtcaggaagaattaggtaaaattgaagatgaattaatcgatcgttttggtgactatccaacggccgtcgagaatttattagctgttgccggtctaaaggttgatgctgacatggctcaagtgctcaatgtggttaaaactgacgataagattaaagtggaatttacgaatgcagcttcacgcgaacttgagggacctaatatttttaaggcattggagcatgtaagcttaaaggctcgcattagtatgaatcaagaaaaaagaatggttgtcttgctattgttgccggataaaatgaagaatcgtgttttattcaatgaactggcaatctttttacaggcagcaagcgacattgtacaaaggtaactgtaggagaaaaatatgaggattgataaatttttaaaagtttcacgattagttaagagaagaaccgtagctaaagaaatggctgatcaaggtagaatcaaagtcaatggtcgagttgtaaaatcaagctacgatgtaaaaattgatgatattattgaagtaggttacggcgccaaaaccatcaaggctaaggtgttaaatattcgcgagaccacgaaaaaagcagaagcaagtgaactgtacgagctagttgattaatgacttttgattaaatcgttgttatacttgacttagtatagttatttagtaattaggggattaaacaatgaatcatggtccacgtatatataattcgttgagtccagaagagcagagggcgcgtcttagacgtaaacaggctaaattagagaaagaaacacaccgcaagcggttgaacgtaattatggcagtttttgctatcattttcgttgctttaggtgtacagattgcaatcaagatttctcaaactggacgactgaataatcaagtacaagctgaaaaacagactttaactaaagtaaaaaataagagaaatgacttagaaactgaaaagcaggatttgaaggatccaaattatgttgctaagctgattcgttataaattctattattctaaatcaaatgagaagatttataacgtgcatgaaagaaatgatgataactaatggaaaagtatcaagctggtaatcgggtgactggtgtaattaataacattactgacttgggcatctttgttactttacctaatcggcattctggtttggttcatcatagtgactttggcaataattggctacgcgaacgtcgtcgttatcatgctggcgatgaagtgcgcgtggttgtggtgcacatccataaagggagatttaatttatcgatcactcgagtgaatgatccggaattagttgaccatgataatcaattttctaagacaaagccagctgattttgatcaagtcctgaatcaaacaacgcgggatgctaaagaagaaattgaaaagctaaagcaagtattaactgagaattaagagatggtccgaaagggccattttttgttagaaaaataatgaaaattaatgatttttttgaacaacatcagattgacttaaaggataaaagactattagtagccgcaagtgcgggaccggattccatggctttactagatatgctagttaatttgcaaaaacaactaagttttactgtttttgcggcacattttgatcatcaattgcgtgcggatagctcatatgaagtagaagttttgcaaaattattgtgctcaaaagaagatttgcctgtttaatggcaagtgggataaacatgatcagccccaaacgggaattgaggcagcggcgcgagaggcacgatatcattttttgactaatgttgctcatagcgagcgaatgaactatttattaactgcgcatcatggtgatgatttgctagaaaatattttgctcaaatttattcgctcgggaaatcctgaagagatgaatagtttgcaagatatcggctctatgcatggcgttgttttgcttagaccactattagcctatagtaagcaagaattactcgaatatgatcaagagcgtgaaattgactatgtaatagattcaactaatacggaggatgagactgttcgaaatcgactgcgtcatcatgtggtgccattattaaaagaggagaatcctaatttaattagtaatgcactgcgttttagtgaaaaaatgagtcaattgacggatttggcggatgagcagttgaatagtatgagaacggttgagccatttttgggtgcttggcgaattaaaacggacaacttaaatgatttatctacagaagaaaaaaatattttttggcaaaagataatctggcaaaaatatcatcgccgggtaaatgaaaatttgggcaattttgaggtgattgattatcaaggttatagttatttagttgaaaataagccacagaaaattgtgcagccatttagtatcgaactaaatcagcaatttgaattcaacggagcttattatttactaactactgataggcaagctgatttgaaagaaataggaagcttttggctggaaagggatgcacattttactgcgggaagtctagtacctgctagcaaattattgttgaaaaatggtcaacgagttaaggcgaaaaagaaatttgcagaaaaggcaattccctttgccttgcgctcttgctgcattacaatttatgctgaaaatgaacctgtttttgtagaaaaatgttatcaaaaacaggactttatcacagatggtaaacattatttcctatacatttattaagaagtcttcaaaataggtgaaaatgttagtggttgcaagctaatttgtgatagaattttaaacgtataacttaaagactttgcggaggttttttatgaagaataaccggaatcggctactttcaaacggccttttctatatagttgtgttccttctgctcctatggggaatcaactgggcactcggcggctctaacaatagtggtagctcagagaatatcagttactcacaatttgttaaagatttgcgtcaaggcaaagttaaaaactttagtgttcaacctgctaatggtgtttacactgtttcaggtagttacaagactgcacaaacaacaaagaatcaatcaaataatagttttgatttctttagtaataattcaagtagaaaagtttcgcgcttctctactaccatgttacagaatgattctaccgtttctaacgtgcaaaacttggcacaaaaaagtaatgctcggatgacaactcaaggagaatcacaatctggcaattggatttcgaccattgtcatgcttgtgccaaccgttttgtttatcgtcatgctttggatgatgatgaaccaaggtggcgctggacgtggtggtggcggcggaataatgaatttcggtcgttcacacgtcaagccagaagatccttctaagaataaggttcgtttctctgacgtagccggtgaagaagaagaaaaacaagaattagtcgaagtagttgaatttttgaaagatccatctaagtacactaagttgggtgcaagaatcccatctggtgttttacttgagggtcctcccggtactggtaagactttgcttgctcgtgctgtagctggtgaagctaacgtgccattttattcaatctcaggttcagacttcgttgaaatgtttgtcggtgttggtgctagtcgtgtacgtgacctgtttaacaatgccaagaaaaatgcaccaagtattatctttatcgatgaaattgatgccattggtcgtcgtcgtggcaatggcaccggcggtggtaatgatgaacgtgaacagactttgaaccaattattggttgaaatggatggttttgaaggcgatgaaggtgttattgtcattgctgctactaaccgttcagacgtcttagacccagctttgcttcgtcctggtcgttttgaccgtaaggtattggtaggtcgtcctgacgttcgtggtcgtgaagctattttaaaggttcacgctaagaacaagccacttgcacctgatgttgatttgaaggaagttgcccgtcaaactcctggctttgtaggtgcagatttggctaacgtcttgaatgaagccgcattagttgctgctcgtcgtaatggtactgagattactgcatcagatattgatgaagccgaagaccgtgtgattgccggtccagctaagaaggatcgtttgatttctgaaaaagaaagaagacgtgttgctttccacgaagctggtcactcaatctgtggtttggtcttaagcgactcacgtactgtacgtaaagttactatcgtacctcgtggccgtgctggtggttataacatcatgttgcctaaagatgatcaattcattttgactaaaaagcaattatttgaacaaattgttggtttgatgggtggtcgtgcaggtgaagaagcaaccattggtgataagtcaactggtgcttctaacgactttgaacaagctactcaaattgcgcatagcatggtagttaactatggtatgaccgaatccttaggtatggttgagcttgaaaaggaaggcgaaagcaatccttacggctttaagccatatagtgaagcaacttcagctaaaattgatgaagctgtaaagaagattttggatgaagctcatgctaaggcccttgagatcgttaaggacaacaaagaaaagcatagaatcattgccgaagctttgctcaagtatgaaaccttgaatgaaaagcaaattatggccttgtataagaccggtaagatgcctgaaaaagacgaagatgaatatccgagtgaatcaaaggcttcaacttatgaagaagctaaggctgctgcagagaagcgcgaagttgaaaaggcagaaaaaaaggattcagatcaagcattagctgatcaagaaaaagataccttggagactccatctgaaaagaatcatgaagttgaagaaaataatcctgagaatcccgaaaaggatcaatcagaaaatgaaacttcaactcaagatactcctgcagatgatgagcataaagacaattaaataaaagtagggcctgtcacaggctctatttttttagaaaagaaggataaaaatgagtgattatttagtaaagtcaattgataagactaaaaacttacgcttgttaaccattaccgctaagggtgtagtgagtgaagcacaaaagcggcatgacttgtggtcagcttcagctgctgtgcttggtcgtactttagtaggatctcttttacttgctggtgcagaattgacagataaggaagaattgacagtccgtttattaggcaatggccctgttggtccaaccatcgtgacagctacctccgatttgaaggtaaagggttatgttaagaatccacatattgctttaccacctaagaaaaatggtcatattgatgtgaaaaaggctgttggacaaggatggtttgaagtaactaaggaccttggcttgaaggaaccatacacaggtcaggtaccaattgtttctggtgaaattgctgaagattttgcttactatttgactaagtcagaacaaattccgtcagctgttggtttgtcagtatttgttaatccaaataattcaatcggtgaagctggtggctttatgttgcaagcacttcctggtgctagtgatgctttgatcgatgaaacgattaagcgaattgatgcattgccagcactctcaacttcatttttggatggaatgacaccagaagacttagcacgtaaaatcttaggaaccgattgtaagattcttgaaaaagatgatgtagcctttaactgtgattgttctaaagaaaagtatgctggtattttggaaactttgaagagcgatcaattgaaagcaatgattaatgaagatcatggtgccgaacttacttgcaatttctgcggtaacaagtatcattattcagaagatgaattgaaagatattttagctaaaaagaacaaagataaagattattaaggcaaataaagccctaaggttttaaccagcggggcttttttgatatcataatagggtaattttgaaaggatgatttggtgaataacagctggaaaattcgcgatatcaccattccaaaccgagttgttgttgcgccgatggcgggagtttcaaactctgcattccgcgttgtctgtaaggaattcggagcggggctggttgtctgcgaaatgatttctgatcatgggatcatttatggaaataaaaagacattaagtatgatggatgttgatccgcgtgaacacccaatgagcattcaaatctttggcggaagcgaggaaactttgcttcaagctgctcaatatattgatcaacataccgatgcggatattattgatattaatatgggttgtcctgtacctaaagtaacaaagactgatgcaggttcgaagtggctacttgattcaaacaagatttatcagatggttcacgcagtagtgcagaacgttaaaaagccggtttctgttaaaatgagaacaggctgggataaaaagcatatttttgctgtagaaaatgctttagctgctcaagaagcaggcgcaagcatgattgcgatgcatggtagaacacgtaaacaaatgtatcaaggtgaagctgactgggaagtattacatgatgttgcccaggtgctagatgtgccttttgtggctaatggtgatattagaacacccgaattagctaaaaaagcattggatgagatcggttgtactgcagtaatggttggtcgcgctgctttaggtaacccttggattttgaaagatatggtacactatctggaaactggtgaaaaattgaagccgcaaactgttcgtgagaaggttgaaacggctaaacatcagcttcacgcacttgttaaaattcacggtgaaaagcgtgctgtaccagaatttcgtcagcaagccgcgtattatttaaagggaattccccgttcagcccgtactcgtgctaaaataaatgaggtctggacgcgtcaagaagtatatgatttgcttgataattttgttgacgagtatgaaaaaagagaagaagctcgtgctgcacgacgcgcgacaatgaacaaataaatggaggaaaagtaaattggcaaagaatgaaatgaatgaccaattaatagttcgtcgccagaagatggaagaattacgtgaaaacggaattgaaccatttggtcaaagaaaatttgatcgtcaagatttggcaagtactttagaagaaaagtatggcaacgaagataaagaagaattaaacgctgatatgcctaagaccaagattgcaggtcgtatgcttgcaaagcgtggtaagggtaaggttggttttgctgatctttacgaccgtactggtaagattcaaatctatgtacgtaaggatattgttggcgaagataactacaagatctttaagaaatctgatattggtgatttcttaggtattgagggtgaagttatgaagactgatactggagagcttactattagagcccttcacgtaactttcttatcaaaggctcttcgtccattaccagataagtaccatggtttaaaggacgttgaggcaatttatcgtcaacgttaccttgatttgattaccaaccatgatagttacatgcgttttgttcaccgtacccaaatcattcaagctattcgtgactacttaaatggtcaaaacttcttggaggttgaaactccagtacttcacaacattcctggtggtgctgaagctcgtccatttattactcaccacaacgctttggatattaacctttacatgagaattgctttggaacttccacttaagcgtttgattgttggtgatatggaacgtgtttacgaaatcggccgtgtattcagaaacgaaggtttggacactcaccacaacccagaatttactgaacttgaaagttacgcagcatactgggactaccatgatgttatggatgaagctgaaggtattatccgtgctgcagctaaggttgtttcagatgacggtaagatcacttaccaaggtactgacattgacttaggcaagccattccgtcgcgttcacatggttgacttgatcaaggaaaagactggcgttgacttctggaagccaatgactcttgaagaagcaactaagattgcggaagaccacgacatccacgttgaaaagttctggaaagttggtcacattattaacgccttctttgaaaagtactgtgaagaaactattgttgacccaaccttcgtttacggtcacccagtagaaatctcaccacttgctaagaagaatgctgacgatccaagatttactgatcgtttcgaaatttacatcatgggtgaagaatacggtaacgccttctcagaattgaacgatcctgacgaccaacgtgaacgtttcgaagctcaaatggaagaacgtgaagcaggtaacgacgaagctgacatgatcgatgaagattaccttcgtgctatggaatacggtatgccacctacaggtggtttgggtatcggtattgaccgtttggtaatgcttttgactgatgctccagctattcgtgatgttcttttgttcccaacaatgcgtccagaacgtgttgaaagcgtagaagctgaagttaaggctgatatggaaaagaagaataaagaaaataagtaatcttataaattaaaaaactcttatctatgttttaagcattgtactgagacgtaaaaagtagacaattaaaatattggattaatagaggcttgacttcgatactctttcggggttaagccttttaatctgctctttatcctttcgttgttatagtattcgatatattcctcgattgcttgagttaattcttgaagattatgatacttgtattcttgatcatagaacatttcagttttgagcaggccaaagaagttctccattagcccatcatccatggagttgccctttctggacatgctttgagtaataccatggagttttaaagctcgctgataacgagggctttgatactgacagccctgatcagtatcaaaaatgcagttattaagagctgtttctttggcaaaagccttgtcaagcattgtcattactaaatctatatctggatgtttggagatagtataagaaactatatcgccaccgcagccgtctagaataggcgataaataaagcttttcattattaagatgaaattcagtgatatcagtataccattttgtgttaggcagggctgcgaagaaatcacgatgaattaaatttggagctattttgccaatagtacctttatagcttgaatatttgcgcttattgcgcctgatgcctttaagacctaatttatgcatccaatagcgaacggttttctccgtaactttccagccctctctgattaactgcaaagctactctgcgatatccatagcggccttgatgatgattaaaaatctcatggattctagcaataagctttgaccgtttaggcttgacgggctgtcgtttgataatcttgtagtatgagcttctggcaattataggtagctcagggtgctctgcaatcgcagctaatacataatttaaactaactttgaattcttgccttagatccgtaatcaccctagctatttcttctgatcttcttggtccaaggcacttagtttttttacgtattcgttcacaatacgcaatcgcaagttttcttctttcagctgctggatctctttctccagttccttgcgagatttctgcttttctttggtcacgggcagggcgtcctttctgtttgataatgacattatacccgtttttcttatattctctaatccaattgttaagcatgccaatacttttaaaccccagttccaaagacagctgtaagtatggtttattgccaaagattgcttgttcaatagttcgctgcttaaactctttggaatagctttggtttttagtagttaaaatttctattccatgcatatcaattaatctaagcatatagtctaaattagctagattcattctgtacgctttagccaattgactgattgagatattttcatctttccatttatgataaatttctattttttgttctttattaaatttagacatagtaaacattctaagctaaatagtgaattagttatccgacgggataattgattcactatttttattcttttgtagaattaaagtagtggtaaaacgatatgccctgaggtctttagacacttgatgtcgcataataaactggcagttttacttaagttttcaatagtctcttcgaagaatgtggacactagatgtcgagtttagaaaattagatctgatttcttaagtaaatacgttttactactaagttttggaggtttttattatgcaagttacttttggaattgatgtaagcaagtctacttctactgtttgtgaactaattggtgaaagcaaaaatgaactaaccattactaataatcgtcctggttttattcaattgcttcatgaattaaccgctttttctaaacatccgcaaattatttttgaagctaccggtgtttattcacgcagactgcaggcttttcttgaagactacggctatgaatatgttgttattaatccgcttaaagccaaaaaagagatgaatatggggctacgctacaacaagaccgataaaactgatgcttatcatttagctttaattcaaagactttatcgccatccggttaatcaaagcgaatcccaaacttataagcagcttaatgctttgagccgcttctatgaccagctgacaagtgacttggtaatagctaaaaatcgacttcaccaagctctacaatcgacttttcctgaaattgaaaatttattttcttctgctagaggtaaaaattactggcaaatagttgtgcgatatcctcattgtgacttagtaagaagagaagataaaaaacagcttattaactggttaatgagcttaaaggggattgcttttaaacacgctctaaggactgcagataaattaattgaattagcttatcaagcttatccagttgtatcttgctctagcatagaagtcgagcaagtgcagtattatgcacacagattgcttaatttaagtgatcaaagagaaaatttaatcgcaagaatggttaagttagcgaagtctttgcctaatcatgatttagaaaacctagaaagcattccaggctttgcacagaccactgctgtcagagttttagcagagttaggagatttacgcagatttagtaatcctaataaaatcaatgcttttatcggaattgatccaggcagatatcagtcaggagaaatggactctaatttaagtattactaaacatggcaatgcagtcgcacgtaagttgctttatcgagctattggacaaattgataatgcagctaagacaaatccgtgtcatatagcagattattatgaaagcaaaaagctatcctctcaaaccaaagggttcaaaaagatagctattgcttcaattcataaactaatcagaaccatttatgccctgattatcaatgatcaaccatatgattacaacgtagccacacataatcaaaaagactttagtcgtaattaattgatcaagtacattataacgctaagcccaaaaatcagatatggatctgggcttatttgtcgtgtctaactaaaaaaataaatcgacactaaaagatgtttaagttgaaatttaaacaaaaaatgaagccaaacttcttattatgcttgactttacgtagaaaaagacctaaaagtgtctaacttttaggtctcagttcacatggataagagtttgtgtttatatattttttaattgagaatcattttttcatcagagtattttttaggatcatttaaatcccattgctgatatctaacttcttgacacttaaagcctaattttttgtaaagctttttggccttagtattttctgcaaatacatcaagactaactggtcgactcatgtatctcaaagctgtcgttgctaaagcatacccgatacctttattttgatgaattggatctacataaatgtaatccagttcttggggatgaactgcaacgaagcccaatatgctgtcagcatcataagctacataaattttgcaggagaaaaaatcatccttatatggagctgtctctaaaggtatgaagtatttttccgcaccaccaattgttagctcttctttacgactaacgtcgtgaatgcgacatacttcagcataatcgtttggttgatattctctgatattaaattttggcatgtttttctcgcttcctaatattaagattttgatttagaaagcaatagtacgtaatctcatgtgaaatctccttcctgaattgtcaaattaagtgcaacagttaggttatgaagagatatattgcttgaagagttcctctgctgtgtgatattggaggattcggcgatatttgtggttaatggcatcagttgcctgttgaacataagcttttgacttgtctttcatgctcttgcccttagggaagaattgacgcaaaagaccattgcagttctcattggtgcccctttcccatggagaatatgggtgagcaaagtaaatctggcagcccttgatcttggtcatatccgcaaactcagagccattgtcaaacgtgattgatttaaaccaggcaggatgtctgtcaatctccttttgaagcagcctttggcatgtgcttgcccgatagtcaggaatcttgataactacttcaaagcgtgtggttctttcagtcaaagtcattaaagcaggctgattcttgcgtctgacgcctttaaccagatctccttcccagtgcagcggagcttttctgtcttcaatctctttaggacgctgttcaatggaattgccaagatgcttcttgtgcaaagcgtgaccgccatggctgtgatgacgcttgttcctgcgtcttttgagcttcataggcagatcaatattgcttatgtccagcaagccctgatcaatatagcgatagacggttggtgtgctgggacaagggtagcctggcatagtccttttgaattcaccaacgaactcatcgatgctggtggcatcaaatttagctttaaagcgtctggagagcattctcaaaaagacagcataatgcttcaatggattgcgctgatagcagtttttgcgacgcttctcataataaatctgtgcagtatcagcgtaatagtgctcatacaataaatagctgctgtctctttgcaggacacttccgcgtttgatttcgcgactgattgtcgacttatggcagccgacttcttgagcgataacagtacgggaagttatgccggaatccagcattgcttgaatttgtccacgttgtacgctggttaattgatgatagtgcttagaaatgctagaatttgaattggtcataaagatcttcctttcttgatttttcgtcacttcaagtttaggtcttcatggcctttttgtttaacacttagtgttgcacttcaattttaaatccggggtgaaatctcctttaattaaattgaagatattatagcaatttttttaattcggtacaataactaaaattaacttagttaaaaacagataagtaatattttttcaaaaagtatttgcaaagagaataatctttgctataataatttttgtatcgcggaagtagttcagtggtagaacatcaccttgccatggtgggggtcgcgggttcgaatcccgtcttccgctccaagatgaagagctcacgaatgtgagctttttttgtgcctaaaataaatttatcttttttgataaaaaggtcttgcaaagaaaaatgtatttgctataataatatctgttgtcgcggaagtagttcagtggtagaacatcaccttgccatggtgggggtcgcgggttcgaatcccgtcttccgctccaagatgaagagctcacgaatgtgagctttttttgtgcctaaaataaatttatcttttttgataaaaaggtcttgcaaagaaaaatgtatttgctataataatatctgttgttgcggaagtagttcagtggtagaacatcaccttgccatggtgggggtcgcgggttcgaatcccgtcttccgctccaagatagaaggctcaccaagtggtgagtctttttttacgggaaatagctcagtttggtagagcgctacgttcgggacgtagaggtcgccggttcaagtccgattttcccgatatacaagctatccgtttgggtagcttttttctttttgttataatatcttttaaaacttaaagggagattaaaaatgacggcaactactgaagaaaaatacaaattattagtggagcaagctagagctttgattgagggagaagatgattggattgctaatacagctaatttatctgctcttttgtttaattcgttaaatgatgtgaattttgcaggtgtttatcgctatgaaaatgatgaactgatattaggtccatttcaggggatgccagcatgtgttcatattcaaatgggaaaaggtgtttgtggtacggctgcacaagcaaaaacaacgcagattgttaaggatgtacatgaatttgctggtcacattgcttgtgatagtgcttcaaattcggaaatcgttgtcccaatttttaatcagggaaaactttggggcgtctttgattttgattcgaccaagctagctaattttgacgaaattgataaaaagtatttaactgaaatagcgaaagcaatttttgcgtaattattagaattggacataatgaagttgaagataagtcaaattgttttacttactgacaaaagaaaagtaaaataccataacgtattttaaagggtggtgtttgtatggaaaattcatatagtaagagcgttaatcaagtattgaaaattgcacgtgaacaagcacaaaattttcatcatcgcttgattggcacagaacatgttttattggctctagtaattgaaactgacggtgaagcaggaaaaatcttgcgttcatggggattaacaccaactgcagtacgtgaagaaattgaacgttatacaggttatggctctgcccctaaggcaagctacatggaaatgtcaccacgtttgagtttagctttggattatgctagaagacgagctaatgacgatggagttaaggaagttaacactaatcatgttttgctgggaattactgcaagtgagcaggttttatcagcaatgattttgaaaaacttgaatgttgatattcctcgtctgcagcaggatgttgaagacagtttgagtcaagaccaagactttggtgattcagctaattggctgggtgatgataacacgacgactggtcaaaagaagcgcaagagcactactcctaacttagataaggtagcggttaatttaaatcaacgtgtgcgtaatggcgagattgatccggtgattggccgtgaccaagaaattaagcgtgtgattcaaattttgtctcgacggactaagaataatcctgtcttagttggtgaaccaggagttggtaagactgctgttgctgaagcgattgcaactgagattgtcaacaaaaaagtgccacaggatatgcttaagaaacgggtaatggccttaaatttaggtagtttagttgctgggactaagtatcgtggtgagtttgaagacagaatgaagaaaatcctgaacgaagtcaccaaggatggcaatgtcattctctttgttgatgaaatgcatactttaattggtgctggtggtgctgaaggtgcaattgatgcttctaatatcttgaagccttcgcttgctcgtggcgatattcaaatgattggtgcaactacttttaatgaatatcaaaagtacattgaaaaagatcaagctttggcacgtcgttttcaacaagtgcgcttaagtgagccttcaagagatgacactttgacaattatgcgtggcttgaagtcgaaatatgaaaagttccatcatgtgactatttctgatgagagcttgaaggatgcagttgatttgtcaacgcgctatatttcggatcgctttttgccagataaggcgattgacttagtagatgaagctagtgccgcagttaagattcgtaataacattagcaatgatgctgagctagaaaaagttaatgagcaaattaagaaactgattacgcaaaagaatatggctgccgctagtcaaaactttgttaaagctgctcaattgcaggatgagcagaacaacttagaaatgcaacgtgaagcaatggtagagaagttagaagacaaagttagtgctaaagctgtggttgagccagaagatatcgctaaagtagtttccaactggactggcgtccctgttacccagatggaacgcaatgaatcacggcagctagctaacctggaaaagattttacaccaacgtgttattgggcaagataaggctgtttcagcagttgcccgtgctattcgtcgtagtagaagcgggattaaagatgaacgtcgtccgattggttccttcttgttcctaggtccaactggtgttggtaagacagaactagctaagtcagttgcagcagcaatgtttggctcggaagacaatttgattaggctagatatgtctgaatatatggaccaaattgcttcaagcaaattaattggctcggcaccaggctatgtcggttatgaagaaggcggtcaattatctgaaaaggttcgtcgtcatccgtactcggttattttgcttgacgaagtagaaaaagctcatccagatgtctttaacttgcttttgcaggttttagatgaaggatttttgactgactccaaaggtagaaaagtcgactttagaaatacaattataatcatgacttctaatttaggttctcgttcgctctttgataataaggcagtcggcttcaatgcagataatgcagatccagccaaggcgagatcagctaaagttgaacaagcaatcaaacaattcttccgcccagaatttttaaacagaatcgatgaaactattatcttcgatgaactagataagaagcagctgcgcaatattgtaactttgttaacgcacaagctggtagttcgtttgcaaaagaagggtatcgaattgaagctatcacgggcagcactggatcagattgcacaagatggttatgatccagaaaatggtgctcgaccattgagaagagcaattcaaaatgatattgaagacaagattgccgagatgctgattgtaggcgaagttaagtcaggcgacactttgaaaattggtagtcagcatggacatttaaaatttgaagtagttaatccgaaaaaagaaactgtaaaagtcaagtgatattggtgctataccttgacaaaatgctgaaaatatcatataatttttgctgatttaaaaagactgagattcaggattttgctgatctattgtccagcaaaatgataagggacaaaaacgacaattgttgtttttgtcttttttatgcctaaaattgcagttttttgaatttgtaacagaaatgtaatatttgctttcttagacagaaaggatgtttttccttgttaaatggacacgtagtgaactacggtaaacatcgaactagacgtagcttctcccgcattaaagaagtattgaagctgcctaacttaactgatgttcaaaccgaatcatataagtggtttcttgataaaggcattaaagaagtctttgacgacattatgccgattagcgatttctcaggtaagctttcattagaatatgttggctataaattgcaaaagccaaagtatacagttgatgaagcccgtaaccatgatgcaacttatgctgcaccaatgcacgttaccttgaaattgactaaccaagaaactggtgaaattaagactcaagatgttttctttggtgatttgccattaatgaccgaatcaggttcatttattgttaacggtgctgaaagagttatcgtttcacaattggtaagatcacctggtgtatattacactggcgattatgacaagaatggtcgtcaaatctttggtactactgttattcctaaccgtggtgcttggcttgaatatgaaaccgacgcaaagaacgtttcatttgttcgtgtagaccgtactcgtaaattgcctcttactgtattgattagagcaatgggtattggctctgacagtgacattattgatatgtttggtcaaagtgatactttgcaattcactttggacaaggatgttcataagaacccagctgactcacgtgtagctgaagccttaaaagatatctatgaaagacttcgtccaggtgaaccaaagactactgattcttcacgttcacttttgtatgcccgtttctttgatccacgtcgttacgatttagcacctgtaggtcgttacaagatcaataagaagctttcacttaagaaccgtttatacggtcaaactttagctgaaactttagctgatccagatactggggaaattgttgctaagaagggtactgtagttacccacgaagtaatggataagttagctccataccttgatcgtgatgactttaagatggtaacttaccaaccttcaaaggaaggcgtattaccagatcctattgcagttcaagaaattaaggtttactcaaaggtagaccctgaacgtgaagttaaattaatgtcaaatggtcatattgctgataacgttaagcatttgactccagctgatgttttagcttcaatcaattacttctttgcattgcaagatgaaattggtactactgatgatattgaccacttgggtaaccgtcgtattcgtcgtgttggtgaacttcttcaaaaccaatttagaattggtttggcacgtatggaacgtgttgttcgtgaaagaatgtcaatccaagatccttcaacagttactccacaacaattgatcaacattcgtccaattgttgcaagtattaaggaattctttggttcatcacaactttcacagtttatggatcaacataacccattaggtgaattgactcataaacgtcgtatgtcagccttagggcctggtggtttgacccgtgaccgtgctggttatgaagttcgtgacgttcactatactcactatggtcgtttgtgtcctatcgaaactccagaaggtcctaacattgggttgatcaactcacttgcttcatatgcgattattaataagtatggttttatcgaaaccccataccgtcgtgtttcttggaaggaccacaaggttactgataagatcgactatttgactgctgacgaagaagataattacattatcgctggtgccaacactccattgaatgatgatggttcatttaaggagaagttgatcttggctcgtcaaaaggaagataacgtcgaagtttctccagataagattgactacatggacgttattcctaagcaagttgtttctgtcgcttcagcatgtattccattccttgaaaacgatgactctaaccgtgctttgatgggtgccaaccagcaacgtcaggctgcaccattaattaatccgcatggttcacttgttggtactggtatggaataccgtgctgcacacgattcaggtgctgctttaatcgctaaggctgctggtgtagttgaatacgttgatgctaatgaaatccgtattagacgtgaagatggtactttggacaaatacacacttgaaaagtaccgtcgttcaaataactctaagtcatacaaccaaactcctaatgttaaattaggtgatcatgttgacaagagtgatgtaattgctaacggtccaactatggatcatggcgaacttgctttaggtcaaaacccattgattgccttcatgacttggaacatgtacaactatgaagatgccatcatgctttctgaacgattagttaaggatgatgtttatacttcaatcagtattgaagattatgaatcagaagctcgtgacactaagttaggtccagaagaaattactagagaacttcctaatattggtgaggatgctttgaaggatcttgatgctgatggtatcgttcgtgttggtgcagaagtccacgatggcgacattttggtaggtaaggtaactcctaagggtgtaactgaattatctgctgaagaaagattacttcacgctattttcggtgaaaaagctcgtgaagttcgtgatacttcacttcgtgtaccacacggtggtggcggtattgttcaagacgttaaggtttatactcgtgaagccggcgatgaactttcaccaggtgttaacacaatggttcgtgtttacatcgctcaaaagagaaagattcaagttggggacaagatgtctggtcgtcacggtaacaagggtactgttgctgcagttgttccagaagaagacatgccatacttaccagatggtactccagtagatatttgtttaaacccaatgggtgttccatcacgtatgaacatcggacagcttcttgaattgcacttaggtgcagctgctcgtcaattgggcattcacgttgcaacaccagtatttgatggtgctgacgaaaatgacgtttgggacacagttcgtcaagcaggtgttgataaagatggtaagaccgttgtttatgatggtcgtaccggtgaaccattccacaaccgtgtatctgtaggtgttatgcactacttgaagttgacccacatggttgacgacaagatccacgcacgttcaattgggccttactcattggttactcaacaaccacttggtggtaaagcacaatttggtggtcagcgttttggtgaaatggaagtttgggcccttgaagcttatggtgctgcttacacattgcaagagattttgacttacaagtcagatgacgttgttggtcgtgtaaaggcatatgaagctattgttaagggtgaaaagattcctaagccaggtgttccagaatcattccgtgttcttgttaaggaacttcaatcattaggtttggatatccgtgttcttgatatgaaccataatgaaattgaacttcgtgatatggatgaagactcaagtgaacacttgaacatcgatactttgtcacggatggcagaagagcaagaaaagaagaagttagccgaagaaactggaaaatcagaagataaagacagtaaagaaaatgcagataagccggtagctcctgcagatgagtctgacgataaagtttctaaatagtaggaggttaaacttttgatcgacgtaaataagtttgaaagtatgcaaattggtcttgcatcacctaacaagatcagaagctggtcatatggtgaagttaaaaagccggagaccatcaactaccgtactttaaagcctgaaaaagatggcttatttgatgagagaatttttggaccaacaaaagattggtcatgtgcttgtggtaagtacaagggcgttagataccgtggtatcgtttgtgaccgttgtggtgttgaagttacttcttcaaaggtaagaagagaacgtatgggtcatattgaattggctgcacctgtaactcacatttggtactttaagggtatcccatcaagaatgggattagttttggacatttctccaagattacttgaagaagttatttactttgctgcatacattgtaattgatccaggtgatactgaccttgaacctaagcaattattaactgaagctgaataccgtgaacaaaaagctaagtacggtaaccgttttgaagctaagatgggtgctgaagctgttcgcgaattgcttaagaaagttgaccttgataaagaagttaaggatttgaagaaagaacttcaaactgccactggtcaaaaacgtacgcgtgcaattagacggttagatatcttggatgccttcaagaattcaggtaacaagcctgaatggatggtaatggatgccgttccagtaattccaccagatcttcgtccaatggttcaacttgaaggtggccgttttgcaacttcagatttgaacgatttgtacagacgtgtaatcaaccgtaacaaccgtttgaagagattgcttgatttgaacgcacctaatattattgttcaaaacgaaaagcgtatgcttcaagaagctgttgatgctttaattgataacggtcgtcgtggtcgtccagttgttggaccaggtaaccgtccattgaagtcactttcacatatgcttaaggggaagcaaggacgtttccgtcaaaacttgcttggtaagcgtgttgactactctggtcgttcagttatcgatgtttcaccaaaattgaagttctatcaatgtggtgtgccacgtccaatggctttggaattgttcaagccatttgtaatgcatgaattagttaaacgtggaattgcatcaaacatcaagaatgctaagcgtaagattgaccgtgaagatgacgatatctgggatgtacttgaagatgtgattaaggaacgtccagttcttttaaaccgtgcacctactcttcaccgtttgagtattcaagcctttgagccaatcttggtaccaggtaagtcaattagacttcacccattagcttgtgaagcctacaatgccgacttcgatggtgaccagatggctattcacgtaccactttctgatgaagctgttgctgaatcaagattgttaatgttggctgctcaccacattttggctcctaaggatggtaagccaattgttactccatcacaggatatcgttttgggtaactactggttaactcaggccgaacgtggtcgtgaaggtgaaggtatgatcttcagctcaccagcagaagctgctgtagcttacgaaaatggcgatattcactaccataccattattggtatgtctgcagatgctatgcctaaaaagccatggcctaagggacatgaacacggcatctttattaccacttatggtaagattgtcttcaatcaattgttcccagatgattacttctatatcaatgaaccaactgaagagaacttgaacaatccgttggatgctaagtacttcttaggtgaaggcgaagagattgataagaagatcgatgaagtaggcgatgatttaatcgctagtccatttaagggaagcttcttgtcagattctattgctactatttacaagtattacaaggttcaaagaacttcagaatacttggatgatttgaagaagttaggctacactagctcaactacttcaggtattactattggtatgactgacgttccagaaatccaagataaggatgaaaaggtagccaaggcacgtaaacaagttgatgttgtttctaagcaatttagacgtggtttgattactgaacaagaacgtcacgaccgagtaattagtatttggaatgcatgtaaggacaagatccaaaacgaaattgcacaaattcacgcacctcgtaatccaatttcaatcatggcagactcaggtgcccgtggtaacatttctaactttactcagttagccggtatgcgtggtttgatggccactcctaacggtggtttgttcgaaattcctgttacttcaaactttaaggaaggtttgtcagtattggaattgttcatgtccactcacggtgctcgtaagggtatgactgatactgcattgaagactgctcagtcaggttacttgactcgtcgtttggttgatgttgctcaggacgttattattcgtgatgacgattgtggtactgatcgtggtattacagttagtgccatcatggaaggtgacgaaatgatcgaaccattatttgaccgtttggttggtcgtttcactgctgagactgttaaagatcctgaaactggcgaaactattgtcggcagagatgtcatgatggatgaaaacatggcacacaagatttgtgatgcaggtgtaactcacgttaagattcgttcaattcttacctgtgatactcctcacggcgtatgtcgcaagtgttacggtatgaaccttgctactggtgaagaagttgaagttggtgaagcagttggtactgttgctgctcaatcaattggtgaaccaggtactcagcttactttgagaactttccacaacggtggtgttgccggtgctgaagatatcactcaaggtttgcctcgtgtgcaagaattgtttgaagcacgtaaccctaagggtcgtgcaaccatttctgaagttgatggtgtaattgattcaattcaagaaaacccagcagaacatactcgtgaaattactgttaagggtaagattgatactagaagctacagtgttccttatacagcttcagttgctgttagcgaaggtgactacgttcatcgtggtgacaagttaactcttggttctgttgatcctaaggaattgattcaagttactgatacattaactactgaaaagtacatcttagctgaagttcaaaaggcttatagaatgcagggtgtagacattgccgacaagcacgttgaagtgttaactcgtcaaatgctgcaaaaggttcgtgtccttgatccaggtgaaactgacatcttgccaggtgaagttatggatattggtcaatttagagaccgcaacaaggaagttattatttctggtggtattccagcaactgctcaaagcgttatcttgggtattactaaggctgctttggaaactaacagtttcttgtcagctgcttcattccaggaaaccacacgtgttcttactgatgcatctattagaggtaagaatgatccacttcttggacttaaggaaaacgttattatcggtaaaattattccagctggtactggtatgcctgtataccgcagcatggaacctgaagctgacgttaagaagccagattcagtatactcaattgctgatattgaaaagcaaatgaaagaaaaggataaagctaagcaagactaagctttattgaaaataaataagcatttccaatcttttaagagcgggaatgcttatttttttgtctaaaaaattaattgggttagtactaatcctaggaaaatatatggaataaatggatagcgatggttaataggagttttttcaataagaaaaattgcaattaccaagattgaagcaaatagaaaaactaaattggcaaatgatggggtgaagtagcaagcgataattaagtaaattaataaatcgcctagccccatttttctttgcattatgctatagctaaaaattcctagcaataatgtaaaagagatccagtcgattaatgtaaaagctgcaaattggttgaataaaatcgcaacgctaatggctggaattagtaggagaagatcaaattcttgcttttgataatcagagattgcaacgactaaaagcgaaaaaagcaaaatagcggtaataatgtcctgtgtcttactaaaatcgagtaaacaaaaggcaaagccgccaattaattcaaataaaaataattcaactggaatttgttgataacaataacgacattttccttgaagaaaaagataagataataatggaatttcatccaaaattgataattcaaggtgacagttgttgcactgagaacgtgagtaaataaaatttttatcattccagtgctcgtaaactactgctgcgtgagaagccaagcaacttccaattataaagttagtaaaaataaataagtatttcaaaaaaacacctccactatttattacgcaaaaatagccgatttttctttttttattttgaaaaagtttgctttctgcttaaaaccgagtacaatagtctttgtatgttttgaacagtctattcgtgagtaaaaaagaaactcccggatgtgtgaacaaaatagtattttaggaggaaaaattaatgccaaccattaatcaattggtaagaaaaggccgtcattcaaaggtcactaagtcaaagtcacctgctttgaattacagctacaacagtatgaagaaggaatcagtattcaacccagctccacaaatgcgtggtgttgcaactcgtgttggtactatgactccaaagaagcctaactcagctttacgtaagtacgctcgtgttcgtctttcaaacttgatcgaagttactgcttacattccaggtgaaggccacaacttgcaagaacactcagttgtattaatccgtggtggtcgtgtaaaggaccttcctggtgtacgttatcacatcgttcgtggtgcccttgatactgctggtgttgatggcagaaagcaaagccgttctaagtacggtactaagaaagattaaaggaggagttaaataatgcctagaaaaggtcacgtaactaagagagacgttttagcagatccagtttacaactcaaagcttgttactaagttgatcaaccacttaatggtcgatggtaagagagctaaggcatcttcaatcctttacgatgctttcaacattgttcaagacaagactggtaaggaaccacttgatgtatttgaagaagctatgaacaacgttatgccagttttggaagttagagctcgtcgtatcggtggttcaaactaccaaatcccagttgaagtacgtcctgaaagaagaactactttaggtttaagatggcttgtttcatacgctcgtttacgtaacgaacacactatggatgaacgtttagctaacgaaattatcgatgcttcaaacaacactggttcagcagttaagaagcgtgaagatgttcaccgtatggctgaagctaaccgtgcatttgcacactaccgcttctaatttgttcgttttaatttaaggagagaataatttatggctaacaagcgtgaatttccattagcaaagacacgtaacatcggtattatggcccacatcgatgcgggtaagactactactactgaacgtatcctttactacactggtaagatccacaaaattggtgaaactcacgaaggtgattcacaaatggactggatggatgaagaaaaggaacgtggtatcaccattacttctgcagctactactgcacaatggaaagaccacagaattaacatcatcgacaccccaggacacgttgacttcactatcgaagtagaacgttcacttcgtgttcttgatggtgccgtaactgttcttgatgcccaagctggtgttgaaccacaaactgaaaacgtatggcgtcaagctgaaacttacggtgttcctcgtattgttttcgttaacaagatggataagatcggtgctgacttcgataagtcagttaagtcattgcacgaacgtttaaacgctaatgcccatgctgttcaaatgccaattggttcagctgacacttttgaaggtgttatcgacttaatcaacatggttgccgacatctacgacgaagataagcttggttctaagtgggatactgttccagttcctgacgaatacaaggaagaagctgaagcacgtcgtaacgacttaattgaagccgtagccgatgttgatgacggcatcatggaaaaattccttggcggtgaagaaatttctaacgatgaattaaaggcagctatccgtaaagctactttggacttgaagttcttcccagtttacgctggctcagccttcaagaacaagggtgttcaaatgatgcttgacggtgttattgactacttgccatcaccacttgacgttaagccttacgttgctcacaatcctaagactggtgatgaagttgaacttatggctgacgataagaagccatttgcagctcttgcatttaagattgctactgacccattcgtaggtcgtttgactttcatccgtgtttacaccggttctcttgaatcaggttcatacgtattgaacgcttcaaagaattcacgtgaacgtgtaggtcgtttgcttcaaatgcacgctaactcacgtactgaaattccagaagtattctcaggtgacatcgctggtgctatcggtttgaagaacaccactactggtgactcattaactgacccagatcacccacttattttggaaagcttgaaagttccagatccagttatccaagtatcagttgaacctaagtcaaaggctgaccgtgataagatggacgttgctttgcaaaagcttactgaagaagacccaactttccgtgctgaaactaacccagaaactggtcaaaccttgatttcaggtatgggtgaacttcaccttgacatcatggttgaacgtatgagacgtgaatttaacgttgatgctaagattggtgaaccacaagttgcttaccgtgaaaccttcaccaaggaagctaaggcacaaggtaagtttgttcgtcaatcaggtggtaaaggtcaatacggtgacgtttggattgactttactcctaacgaagaaggtaagggttacgaattcgaagatgccatcgttggtggtgttgttcctcgtgaattcattccttcagttgaccaaggtttacaagaagctatgaagaatggtgttcttgcaggttacccattgatcgacgttaaggctaagctttacgatggtagttatcacgaagtcgactcatcagaagctgccttcaaggttgctgcttcacttgctttgaagaatgctgcttcaaaggctggcgcagttatcttggaaccaattatgaaggttcaagtaactactccagaagaatacttaggtgatgttatgggttcaatcactgctcgtcgtggtaccatggaaggtatggaagacagagccggtgctaagatcatcaactcatttgttccactttcagaaatgtttggttacgcaactactttgcgttcatcaactcaaggtcgtggtacatttactatggtatttgatcactactcaccaacacctaaatcaattcaagctgacatcattaagaagcgcggcggagatgctgaatagcttccgttaagaactgattaatgcagtagcttaattgaaaacaatttcatataaaaaagagttatcatttttattttgataactctttttttgtaaataaatttaagaaaaaagtcgtaaacccttgatatttaaggagggacaaagtacaatagtctttgtgcttatgggacagtgtgcccttaagtgtgaaaattgttgtaaagcgttgacgcaaaaggttgcggcacgccaggctgcattgccacagtggcgtgcgggaaatttttgccgagcgagtcatcttttaaagaagacgttaaggaggtaatttaatggcaagtcaaacaattcgtattagacttaagtcttacgaacatggtattctcgatgaatcagctgctaagatcgtagctactgcaaagagaactggtgctgaaatttcaggtccagttcctcttccaacagaaagaactttattcacagttcttcgttcaccacacaagaacaaggactcacgtgaacaattcgaaatgcgcactcacaagcgtttaatcgatattttgaatccaacaccaaagactgttgattcattaatgaagcttgatcttccaagcggtgtagacatcgaaattaaactgtaatttaaatagaaagaggtgtaaacatgaccaaaggaatcttaggaagaaaagttggtatgactcaaatctttactaaagatggtgtccttgttcctgtaactgttgttgaagcaactcctaacgttgttatgcaagttaagactgttgaatcagatggttacgaagcagttcaattaggttaccaagacaagcgtgaagttttgagcaacaaaccagaaaaaggtcatgctgataaagcaaagacttcgcctaagcgcttcattcgggaaatccgcggtgttgagcttaaggactatgaagttggctcagaagttactgtggatacatttaaggaaggtgacgttgtaaacgttactggtacttcaagaggtcatggataccaaggtaacatcaagcgttggggccaatcaagaggaccagaaactcacggttcaagataccacagaattcctggttcaatgggttccatcattaaccgtgtaccaaagggcaagcgtttgccaggtcacatgggtgtgaagaaagttaccattgaaaacttagtaattgaaaaagttgttgcagacaagaacgtattgatgattaagggtaacgtcccaggtgctaagaactcattaatcgttgttaaaactgcttctaaagctgtaaaggctgataaataggaaggaggactagaatggctaatttaaaagttatggatcaaaacggtaaagactctggtgaagttactttaaacgataaggtttttggtattgaaccaaatgaaagtgtcgtttttgaagcaattattagacaaagagccggcaagcgtcaaggtacctcaaaggttaagaatagatctgctgttcgcggcggtggtaagaagccttggagacaaaagggtactggtcgtgctcgtcaaggttctatcagagctccacaatggcgcggtggtggtacagtctttggcccaactccacgttcatacgcatacactatgccaagaaagcaacgtcgtttggctattaagtcagttctttcccaaaagttgattgacaatgatttaattgttttagataagttgactatgtcagctcctaagactaaggaattagtatcaatgttaaacggcttaaatgctgacggtaaagttttaattgtttcagatgataacaatgtacaactttccgcaagaaacttgactaaggttaaggttgttccagttaatggcttaaacgttgaagatgctgttaactatggcaagttgatcttagatcaagatgctgttaagaagatcgaggaggttttggcttaatggacgcacgcgatatcattttaagacctgtcattactgaaaagtccacgaacttaatggatgataagaagtacacattcgacgtgcttttaactgcaaccaagacacaagttcgcaatgctgttgaagaaatcttcgatgttaaagttaagaacgtaaacattatgaacgttcgcggcaaggacaagcgagtaggtcgttacactggtaagaccgctcgtcgtagaaaggctatcgttactttaactaacgattcaaacgacatcaagattttccaagacgataacacagaagacaacaagtaataggaggtcagtcaattggctattaagatttacaagccaaccacgaatggtcgtcgtcatatgacttcttccgactttgctgagatcaccaagacaaagcctgaaaagactttacttgaatctcaatcacatactgcaggtcgtaactcatatggtcatatcactgtaagacaccgtggtggtggtcacaaacaaaaataccgtatcatcgactttaagcgtaacaaggacaacgcaaaggcagttgtaaaggctatcgaatacgatccaaacagaactgctaacattgctttgcttcactacactgatggtatcaaagcttacatcttagctcctaagggcttaaaagttggcgatgtagttgaatcaggtgattcagttgacattaagccaggtaacgctttggaattaaagaatatcccaactggtacttcaattcacaatatcgaattaaagccaggcaagggtggtcaactcgtaagaagtgctggtgcttcagctcaagttttaggtgctgatggtgattacactttagtaagattacaaagtggtgaagttcgtaagattttgtcatcatgccgtgcaactatcggtactgttggtaatgaacaacactcattgattcaattaggtaaagctggtcgtaaacgttggttgggcaagcgtccacaatcacgtggttctgtaatgaaccctaacgatcacccacatggtggtggtgaaggtaaggctccagttggtcgtcctcaacctatgactccatggggtaagaaggcacgtggtattaagactagagataccaagaaggccagcgagaagttaatcattcgtcaccgtaaaggtagcaagtagtagaaggagggttaattaatgagccgtagtattaaaaaaggtccttttgctgatgcatcattgttaaagaaggttgatgcacaagcagatgcagataagaagcaagttattaagacttggtcacgtcgttcaactattttcccttcctttgtaggtttgactatagctgtttacgatggtagaaaacatgtcccagtatatgtaactgaagacatggttggtcataagttaggtgaatttgttccaacaagaactttccacggacacaaatccactgatgataaagccacaacacaagcttagaggaaggagaaacatctaaatggcagaacaaattagttcagctaaggctgaagcaagaactgttcgcatcgctccaagaaaagctcgtttagtcgttgacttaattcgtggcaagagcgttgctgaagcattagcaatcttggaatttacgcctagagctgcttccccaatcgttgaaaaagttttacgttcagctattgctaacgcagaacataactacgatcttgaaagtgcaaacctttacgtatcagaagcttacgtaaatgaaggtgcaactttgaagagattccgcccacgtgctaagggtatggcttctccaattaacaagagaaccagtcacgtagttgtagtagtttcagaaaagaacgattaagggaggtatattaatgggtcaaaagattaacccaaacggttttcgtctcggtgttatccgtgattgggaatcaaaatggtatgctgacaagggatacaaagaaactttaaatgaagaccttcaaatcagaaaatttatttcagaaaagttgaaggatgcctcagtatctactgttgaaattgaacgtgcagccaacagaatcaacatttcaattcatactgctaagccaggtatggtaattggtaaaggtggttctgaagttgaagctttgagaaaacaattaaatgctttaactggtaagcaagttcacattaatattgttgaaattaagaaaccagatcttgatgctaagttagtagcagatagtattgctcgtcaacttgaagctcgtattgctttcagacgtgctatgcgtcaagctactcaaagagctatgcgtgctggtgccaagggtattaaggttcaaacttcaggtcgtttgaacggtgccgatatggcaagaagagaatggcacacagaaggtcgtgttccattacaaactttgagagctgatattgattacgcttgggtaaatgccttcactacttatggtgaaattggtgttcaagtttggatcaaccgtggcgaaatcttacctactcgtaagaataagccagcttcaaagccagcgaagggaggaaatagataatgcctttagtaccaaagcgagtaaaacaccgtcgtgaattccgtggtaagatgcgtggtgctgctaagggtggtaaatatattgcctttggtgaatatggtcttgaagccctcgaatcacattggattactaaccgtcaaatcgaagcagctcgtgttgctatgactcgttacatgaaacgtggcggtaaggtttggatcagaattttccctcaaaagtcatacactgctaaaggtgttggtgtacgtatgggttcaggtaaaggtgcaccagcaggttgggtagctgtagttaagagagaaaagattatgttcgaaattggtggtgttgatgaagcaactgctcgtgaagctttacgtcttgcttcaactaagttaccaattaagactaagtttgtaactagaagttcggaagtaggtggcgaatctaatgaaggctaaagatatcagagcattaaccactgatgaaatgttagaaaaagaaaagcaatacaaagaagaactcttcaatttgcgtttccaacaagcaacgggtcaattagaaaataccgctcgcttgagcaaagtccgcaagaatatcgccagaatcaagactattctgagcgaaaaagcgttagaaaacaattaatggaagggagctattaacttgagcgaaacaaacgaaagaaatcgtcgtcacgtataccaaggtcgtgtagtttctgataagatggacaagactatcgttgtagttgttgacacttacaagaaccaccctgtttacaacaagcgtattagatattcaaagaagtactacgcacaagacgaaaataacgaagctaaagttggcgatactgtacgtatcatggaaacccgtccattatctcgtaagaagcgcttccgtttagtaaagattgttaagaaatctgtttaatttgcggatttagtgaggggaggattacacagtgattcaaaacgaatcccgtttaaaggttgctgataactctggtgccagagaacttttagttattagagtcttaggtggttcaaagcgtaagaccggtaacattggtgacatcgtagtatgtactgttaaacaagcaacaccaggtggcgttgtcaaaaaaggcgacgttgtaaaagctgttattgttagaactaaatcaggtgcacgtcgtgaagatggttcatacatcaagttcgacgaaaatgctggcgtaattatcaacgcagacaagagcccacgtggtactcgtatctttgggccagttgcacgtgagttacgtgagaacgactttatgaagatcgtctctcttgctcctgaagtcttataattgatagtgaggtgcactgatgttcgttaaaactggtgacaaagtaaaagttattgccggaaaagataaaggtaaagaaggtactgttctttctgttaacgttaagaaaaaccgtgtagtggttaagggcgttaacaagattaagaagcaccaaaagccttcacaaagcaatgctaatggtggtgtagttgaatcagaaggttcaattcacgcatcaaacgttaaagtaattagtagtaaaaaagaagataagtagaagggaggacacacatggcaagttatttagctaaggaatacaacgaaaaggtagctcctgcattagaagaaaagtttaactacaagtcatctatgcaagtacctaagatcgacaagattgttttaaacatgggtgttggtgatgcagtttctaacgccaagaacttagatgaagcagttgaagaattaactttgatctcaggtcaaaagccattaatcactaaggccaagaaatcaatcgctaacttccgtttacgtgaaggtatgtctatcggtgctaaggtaactcttagaggcgacagaatgtacgatttcttgtacaagttaatcaatgtttctcttccacgtgttcgtgacttccgtggtgtatcaactcgttcatttgatggtcgtggtaactacactttaggtattaaagaacaattgattttcccagaaatcgattttgataaggtaaaccgcactagaggtttagatattgttatcgtaactactgccaacactgatgaagaagctcgtgaacttttgactcaatttggtatgccgtttgcaagatagtggaggacattaatggctaaaacatcacaaaaaatcagaaatcgtcgtcctgctaagttctcttcacgcgaatatacacgttgcgagagatgtggtcgtccacactccgtataccgtaaattcgggttatgccgtatttgcttaaaggaattagcacacaagggtcaaatccctggtcttaaaaaggctagttggtagtatacggttaggaggatagcttaaatggtcatgacagatccaatcgcagattacttgactagaatcagaaatgccaacatggcaaaacacgattcagttgaaattcctgcatcaaacattaaaaagtctatttcagaaattttgaaacgtgaaggcttcatccgtgattacgaagttgcagatgataacaagcaaggcgttatcaaggtattcttgaaatatggtccaaatggagaacgtgttatctcaggtttgaagcgtatttctaagccaggtcttagaaactacgttggcgctgaagacttacctaaagttcttaatggcttaggcattgccatcgtttctacttctgctggtgttattaccgacaaggaagcaagacaaaagaacgttggcggcgaagtaattgcctacatttggtaatactgacagaaaggagaacaatcaatgagccgaatcggtttaaagactattgaagtccctgacagtgtcactgttaccaaggaaggcgacaatattactgttaagggcccaaagggtgaattaactagatacttcgatccaaagattaagtttgaacaaaaagatggtgaaattaacttttcacgttcaagcgaaagcgacaaagcacttcacggtactgaaagagctaacttagcttcaatgatcgaaggtgtagttgacggttataagaagactttgaagttaatcggtgttggttaccgtgcacaagcacaaggcaacaagattactttaaatgttggttattcacacccagttgtattgactgcaccagaaggtgtttctgtaaaggcaacttcagcaactgatgtagaagttgaaggtgtttcaaagcaagatgttggtcaatttgcagctgaaatccgtgccgtacgtccaccagaaccttataagggtaaaggtattcgttatgttgatgaatacgtacgtcgcaaggaaggtaagactggtaagtaataagtagttatttttgaggtgaaattgtgatttctaaaccagataaaaacaagttacgcttaaagcgtcatagacgtattcgtggaaaaatttctggtactgctgagcgcccacgcttaagcatttttcgttcaaataaaaacatctacgctcaattaattgatgacgtagcgggtgttacgcttgcaagcgcctcaactttggatgaaaatgtatcagatgcaactaaagtagaacaagctgctgctgtaggtaaggcaattgctgaagctgcaaaggcaaaggacatttctactgttgtattcgacagaagtggttacttataccacggccgtgttcaagcattagctgatgctgctcgtgaaaacggattagatttctaggaaaggagaattaacacatggcaaaccgcaatgattctcgtaacaatcgcagaaacaaagacgatatcgaagatcaattagtcgctgtcaaccgtattactaaggttgttaaaggtggccgtcgcatgagatttgctgctcttgttgttgttggcgacaagaaaggccgtgtaggttttggtactggtaaagctcaagaagtcccagaagcaatccgtaaggctgtagaagacggtaagaagaaaatgatcaatgtacctaaagttggtactactattcctcatgaagttattggtcactacggttcaggtaacattttattgaaacctgctgaagctggttctggtgttgctgctggtggtgccgtacgtatcgttatggatatggctggtatctcagacgtaacttcaaagtcacttggttcaaacactccaattaacgttgttcgtgcaactatcgatggtttgaagaagcttagaactagtgaagaagttgcaaaacttcgtcaacctgaaagagcttaagattagggagatcatagatgactgatttaaagattactttaattagaagtgttgctcaccgtctacctcaacaaagaaagatcgttaaagctcttggtttaggtagagtggatagtactgttgttcttccagacaacgctgctactcgtggtgcattattaaagattgctcacttaatctctgttgaagagattaacaaatagaatatcaaggaggtgccaaattaatgaagcttcatgaattacattctgctgaaggctcacgtcgcaatagaaaacgtgttggtcgtggtacttcaagtggttacggtaaaacttcaggccgtggtcaaaagggtcaattagctcgtcaaggcggtcatactcgtttaggttttgaaggtggtcaaatgccattattcagaactatgcctaagcgtggttttaagaacattaaccgcaaggaatatgcaattgtaaacttagatgatttaaacaagttcgaagacggcagtgaagtaactgtagaatcacttaaagataatggcttagtaaagaaagaattgtcaggtgttaagttacttggcaagggcgaattaaaagttaagttaactgtaaaggttaataaagtttccgcatctgctaagcaagcagttgaagccgctggcggaactgttgaggtgatctaatgttttcgaccttgaagaacgccttcaaagataaagaaattagaaataagctctatttcacgctctttattcttttgctgtatcggatcggtgcaaacattaccgttcccggtgttaatgcgaaggcgatcacgcaggttgcgcaaactggtttagttccaatgctggatactgtatctggtggtggactagataactattcaatattttctttgggtgtttctccttatattacggctcagattgttatccagctgctacagatggatattgttcctacgttagtagaatggggaaaacaaggtgaagtaggtcgacgtaaaacaaatcaagtaactagatatttagcattagttgttgcttttatccagagtattggtattacgttaggctttaacgctttaactcaaatgggtttggtaaagaatcaaacaccacagacttatatagaaattgctattgttatgactgctggaactatgttattaacatggttgggtgatgaaatcactgataagggtctaggtaatggtatctcagtaattatttttgctggtattattgcaagactaccaagtggtctatggcaaatttataaggaagaaattattaataatagtgctagtgatcgttggcaaggcattttgttcttcatcgcggttatagttgcaatccttatcgtaactcaatttgttacatgggttgaacaagctgatcgtcgtattccaattcaatatacgagaagagcgacgatgagtggttctgaaagttttctaccattaaaggttaatgtatctggagttattccggttatttttgccagttcatttattgttacaccggcaacgattttaatggcctttcaaagaacccagggcgatcaacaatggtttaaagtaatgaaccaaatctttagcttacaaactactcctggggtaattatctacactcttttaattatcttatttacattcttctacgctttcgtacaggtcaaccctgagaagctagcagaaaacttacaaaagcagggtgcttatattcctagtgtatggccaggaaaagatactcaggattatatttcaaagatgttgatgaaattatcaacagtaggttcattattcttgggcttagttgctttactgcctcaattggctactaacttttggaatctcccaagttccattggtttaggaggaacaagtcttttaattgtgattggggttgttctcgagttatctcgtcaaattaacggcttgttaatgaagagagaatatgttggattcatcagataggaacggataaatgattaacttaattcttttagggttaccaggtgctggtaaaggtacagcatcagagcgaatcgttgataaatatcacttaactcatatttcaactggggatatgtttagggaagcaatggctaacaagacgaaggttggtcttgaagctaagagttatatcgataagggtaatctagtacccgatgaagttactgcaaagttggttgaggaacgtttaagtcaacctgatattaaagaaggttttatcttagatggttttccaagaaccactgtacaagcagaacttttagatggtattacaaaacgtttggagaaacctttaacaaatgtcattgcgcttgaagttgacgaagacactttgattaagcgtttatcagcaagatacatgtgtaaaaattgtggagctacttacaacaagctttccaagcagccaaaagttgagggcacttgtgatcgctgtggtggccatgaattttatcaacgtgaagatgataaaccagaagttgttaagaatcgtcttgaagttaatgaaaagatgaatgcacctttgaaggacttttatcagaagaaaggcttgctcactgtaattaatggtgaacaaactccagaaaaagtctttgaagatattgatgcggtattgagtaataatcaatagaagaaaaatttgtataattttttatccgtgttataatttcaaagtatatgactgtttaattgcggaggaacaactttggcaaaagatgatgtcattgaagtagaaggtaaggtagttgataccttacctaatgctatgtttaaagttgaattggaaaatggagccacaattttagcacacgtttctggtaaaattaggatgcactacattcgtattttgccgggagaccgtgtgactgtggaattatctccatatgatttaactaaaggtagaattacgtatcggtttataaagtaatataacggagggaaacatgaaggttagaccatctgttaaaccaatgtgtgaacattgtaaagttatcaagagacatggccgtgtgatggtaatttgctcagcaaatccaaagcacaagcaacgtcaaggttagaaatagagggggtgtagtttatggctcgtattgctggtgttgacttaccaagagataaaagaatcgttatcgctttaacttacatttacggtatcggtgaagcaactgccaagaaaatttgtgcttatgctggagtatctgaagatattcgttcaaaggatttaactccagaagatcaagaaaagcttcgtgctgaagttgacaagtaccgtgttgaaggtgacttacgtcgtgaagtaagcatgaacattaagcgtttagttgatattggttcttaccgtggtattcgtcaccgccgtggacttccagttcgtggccaaaataccaagaacaatgctcgtactcgtaagggtactaagagaaatcgttaattttatttataaggaggtttattgatgcctgcaaagaaaacagcacgtaagcgtcgtgtgaagaagcatgttgaaagcggtgtagcacacattcactcaacgtttaataatactttagtcatgattactgacgttcaaggtaatgcagttgcttggtcttcagctggtgcattgggctttaagggtagtcgtaagtctactccatttgcagctcaaatggcagctgaagcagcagctaagagtgcaatggaccaaggcatgaaacatgtagaagtttcagttaaaggtcctggtgctggtcgtgaatctgctattagatcacttcaagcaactggtcttgaaattactgcaattcgtgacgttacgccagttcctcacaatggttccagaccaccaaaacgtcgtcgtgtttaattttgtccttgatataggacgtaacgttttgaaaggggcccagtaatgattgaatttgaaaaaccaaatattaccgttgttgaacaagaagattcttacggtaagtttgttgttgaaccacttgagcgaggctttggtactactttaggtaattctttaagaagagtattacttacttctattccaggtactggacttgtttatgtgcaaattgatggcgttttacacgagttctcaacagttcctggcgtcagagaagatgtaaccaagatcatcttgaacttgaagaaacttgaattaaagtctctttcagatgaacaaaaggttattgaattggacattgaaggtccagccacagtaactgctgatgatcttaaagttgatgcagacgttcaagtcttgaatccggatcaatatatttgtaccattgctgaaggtggacacttgcatatggaacttgccgtaaagaatggtagaggttatgttgctgcaagtgacaataagagtgatgacatgccaatcggagttatcccagttgactctttattctcaccaattaagaaggttaactaccaagttgaatcaactcgtgttggtaagagagatgactttgataagctcacttttgagatttggactgacggttcaatcaagcctaatgacgcccttagttttgctgctaaaattttagttgaacactttaaggtatttgaatcagcagatgcaaatgctaaattcagcgaagtaatggtggaaaaggaagacgataagaaggaaaagaagcttgagatgactatcgaagagcttgacctttctgttcgttcatataactgcctgaagcgtgctggcattaatactcttcaagagttaactgacaagacagaatcagatatgatgcgtgtacgtaacttaggacgtaaatcattggaagaagttaaaaataaattaaccgacttaggtctttcacttcgtcaagaagactaagcttaggtgaataaaggaggcaaatccatggcataccgtaaattaggtcgcgatagtgctcacagaaaagcaatgcttagagaaatgactactcaattaatcatgaacgaacgcattgttactactgaaactcgtgctaaagaagttcgtaagactgccgaaaagatgatcactttaggtaagcgcggcgatttagcagctagaagaaaggctgctgcatttgtacgtgacgaagttgcagatgttcacgaagaaaaagatgcagttgttgttaagtcagcattgcaaaagcttttcagtgatgtagcacctcgttacaaggaccgtaatggtggttacaccagaattttgaagttagccgttcctcgtaagggtgacgctgctccaatggttattcttgaattagtttaatttagagtaacacaacttaatacgtattaagaattatccatgaaagtgagaataagcgtaaagatgatggcgcaagcttagtctagcttagatgataaaaatcatccctcttcatgggtgattttttttgctctttttttctgttacaattgctaataagcgatttaagaaaggaagtggaaaaatgccagtagatagtgctgttgaatttaaggatgtctcatttacctatcccgatactaaaaaagcgattcttgatcagattagttttaaaataaaaagaggttcctggacatctttgataggtcacaacggtagcggtaagtccacaatttctaaattaattaatgggttacttttgcctgattctgctaataattctagaatcactgttttaggaatgacgttaaatcaaaagacagtctgggatgttagggaaaaagtcggtattgtatttcagaatccagataatcagtttgttggagctactgttggcgatgatgttgcttttgggcttgagaatagagctgttcctcgggagcaaatggtaaaaatagtcagaaaagttttagcagacgttggaatgctggattatatagatgcagagccagctaatctttctggtggacaaaagcaaagagtagcaattgcaggtattcttgccgtagaaccgaaaattattattttagatgaatcaacttcgatgcttgatcctaaggggagagagcaggtgctaaaaattattaagcatttaaagaaagagaagaatttgacagttatttcgattacacatgacattgatgaggctaatatggctgatgatgtgatcgtcttaaatgatggcaagattttagctcaaggaactccaactgaaatttttagtaaaactgaaatgttgcaagaaatagggctagacattccatttgtacaaaaattaataaataaattaaatgaagtgggaatttctgtacctaaaaatataaaaacgaaagatgagttgaaacaatatctatgtcaattaaatttgaaaaagtaaattatatctattctcccggaacttcaatggagaaaaaaggattagataatgtttcatttgaattaactgaaaatagttttgttgcattggtaggtcataccggtagtggtaagtcgactttgatgcagcattttaatgcattactgaagccgagttcaggaacaattgatattgctggttatcatattactgctcaaacaggaaataagaatttgaaaaagttacgcaagcgggttagtttggtttttcagtttcctgaagcacagctttttgaaaatactgtgcttgaagacattgaatttggtcctaaaaattttggagcaaccgatgatgaagctaaaagtaaagctttgaaatggttgaagcgagtaggattggatgaatcgatggcaaataagtcgccatttgagttatctggaggacaaatgcggcgtgttgcaattgctggggtaatggctgatgaaccagaaattttatgcttagatgagccagcagcggggttagatcctaagtctcgtaaggaaatgatgaaattatttgttgattatcaaaaagcaggtcatactgtaatcttggttacgcataatatggatgatgtggtcgaatatgcagatgatgttttagtgatggaacatggtaaattaattagacatgatgcgcctaaggcgatttttactaataaaaactggctagaaaagcactatttgagtgaaccaacggctagtctttttgcctcagatttgacgaactttaactttaaagataaaccgttaacactggatcagcttgttaatgaaattaagaaaaatttgcgagggtagtttatgagtaagataattgtaggacgttatattccgggagattctcttatttataaaatggatcctcggagtaaattattagttaccatattatttatattggctatctttttagctaataattcaataacttatgcgattgtgaccattttttgttttttggctgtgatcgctacaggattaaatgcaaaagtattttgggatggcgttaagcctttgattggtttaattttctttacgtcgcttttgcaattgttttttatgactggtggtcatatttattggcattggtggattttttcattatctagctacggtttgattaatgcaatctatatttttattcgttttacattaattattttaatttcaacagtaatgacagttactacaatgccacttgaaattgctgatgcgatggaatggttgcttaagccgcttaagttgtttaaagtgcctgtggataaaattgcgttagtaatttcaattgcacttcgtttcgtaccaacattatttgatgaaacattgaaaattatgaatgctcaaagatcacgtggagcagattttaatgatggtggtttgattcaaagagcaaaagcaattactccaatcttagtgccgctgtttattcattctttagaaacagcaattgatttatcaacggcaatggaatcacgcggttaccgtagtagtgaaggacgaacaagatatcgtgttttaagttggtcaaaatatgatctaattgcattaatctattttgtattgttggtcggattattattaatttttaggacacattaaagatatgacaacaagatataagatgacgatggcttatgatggccatctttttcatggctttcagcttcagccagatcagcgaacagtgcaaggaacaattgaggatgcactgaaaaaaatgactaaaggaaaacgagttattgtgcagggctcaggacgaaccgatgcaggtgtgcatgcagttgggcaagtaattcattttgattatcctgggaagacaataccagcgaatagaatgattttagcgatgaattcaatgatgccaactgatattatttttaataattgtcaaattgttaatgatgattttcatgcacgttactccattaaaggaaaatggtatcgttatcgcgttagtttagatcattttgttaatccatttaaacgtttttatacaggacattttccatatccactagatattgaaaagatgcaaattgcggcacaagatttgttgggaaaacatgactttactagttttgcggctagtggtggtcgaattgaagataaagtgcgaacaatttattatgtaaaaatcacagaggataaaaaagataatgaagtgatttttgacttcattggttcaggattcttatataatatggttcgaatcatggtagcagcgttgcttgagattgggaatgatcgtagaccagtgcatgatttgcagcgggtaatcgcggcaaaagatcgacaagaagtgagacaaacagctcatgccagcggtttatatctttatcatgttttttatgatgaagtaccacaaaaatatcgcttagatcagcatttataattgacattttgcctaaaaggacgtactctaatatagtatgtttgtccacgataggccccggaaacttattgttttcaaactgcaaataaacggaggaatttaaattgcgtactacaccattagcaaaatctagtgaaatcgaacgtaagtggtacattattgatgcaactgacgtaacccttggtcgtctttctgctgctgttgccactattttgagaggtaagaacaagcctcaatacacacctaatgttgatactggtgataacgttatcgttatcaacgcatcaaagattagattgactggtaaaaaggcttcagacaagttctactaccaccactcatcatggcgtggcggcttgaaggccgtttcatacggtgaattgcttgctaataacccagttaagatggttgaaatctcagttaagggtatgcttccaaagaacactcttggtcaccatgaattcatgaagatgcatgtttatgctggcgaagaccacaagcacgaagcacaaaagcctgaaaagttagatattaacaaattaatctaggaggttatataatggcacaacaagctgcatacacaggtactggtcgccgcaaggattcagttgcgcgtgttcgtttagtaccaggtaacggtaagatcactgttaacgataaagatgttgatcaatacattccattccctaacttggttaaggacttgaagcaaccattgacattaactgaaactgaaggtcaatacgacattcacgttaatgttaacggtggtggtttctcaggtcaagctggggctatccgtcttggtatcgctcgtgcacttcttgaagttgacccagacttccgtagtccacttaagaaggccggtttcttaacccgtgacccaagaatgaaggaaagaaagaagccaggtttgaagaaagcccgtaaagcttctcaattctcaaagcgttaatatttacgttcaaaaatgttgttatatcaacgttttggagacttcagttggtcacctatggtcacaatgctatagggattccaatagatttaaagcattcgcatcttgcgagtgctttttttctggcattaattccagatagtatttttcagtagttaagattgaatcgtgtcctaatcttctgctaacataagataaaggaatattattactgaataaaaaagaagcgtgggtatctcttaaaccatgaaatgtggttgaagggatgcctatttttttgagcaattcttttaacataccagactgtttaaagctgaaccagtcaaacaaatagccagaatctttttgagagatatccttcaatagatcgtaaatattcttaggaatagtcacactgcgtctagaatgtttagtttttaatttagtatcgtcagtagtagggctaattgatcgttttacttcaacgcaataatactgaccatcgtaatgcacatcctcaggcttaatacctaaaatttcaccacgtcttaaaccagtactaatctcaagtaataccattaagttaaattcattatctgtatgttcaagtaagtaatgttttaacttagttagatcagacattgatgaagctttattgcgtttaggtaattcttttccgtgtgctttaagtaaactagcaaaatcattgtaaatgtatcccttaacataagcatagcggagagcagttctaattttcttaagtaattcagttaccgttttcttagaatgtgttttgccatatttatctaagatactttgcatttgtacgtcatcaagcttaccaagtttagcggttggaaaaagattatcaattactttaccagctttaacataattatcaaaagttgcttttctaacgtcatgtacttttactgtttgaacgaataaataataaaagtccttgaataaagtgttttgctgggctattgcttgacctttagccttttgtagttcaagagtagtactccaaactttagcttctttttcagttttaaaactcttagttaagtaatcacgttttccgagactgtaaaatagtttgtgtaaggatgaatgattccttaaatttatttctttaaacattagaaaaaggagttcctttctcgtatgattggtttgaacaaaaaaaacacatacagaaagaagaactccttcatgaatgattttaccaaagattttgctcaagctctattcaatccagacaaaataaatgatttattgcgcaaagaactacaacaggctgttaataacttgctagaagctgaattgactgcctttctgggctatgatccctatgccagaaatggctggaatactggcaactctagaaatggtgcttatttccgcaaagttgatacgcaatttggcccaattgaagtgcaagtgcctcgggatcgcaacggtcaatttcatcagcacacgctgcctgactacaagcagcactcggatatcttggaaagcatgattatcaagctttactccaatggcgtgaccaccagggaaatagccgatctaattgaaaagatgtatggcagccattacagtccagctcaggtatcaaatatttccaagcagatgattccaaaggttgaggcttaccacaaacgcaagctaagcgacaagtttttctgcgtctatttggatgcgacataccttcctttgcgccgagaaacgtttgagcgtgaagcagtctatattgccattggcattaaacctaatggacataaggaagtcattgactactgcattgctcctagtgagaacattgaagtctggacagagatgcttcaaaacatgaagtccagaggcttgaagcaagttgaactctttctttctgatggtgttgttggcatgaaaacagccttggccaggacttatcctaaagctcattttcaacgctgtttggttcatgtcatgcgcaatatctgcgctaaagtacgcgtcgacgatcgtgaaaagatcatgaacgaattcaaacaggtgcatcaacagacaaacaaaaaagaagctgcagctgtcttgcacaaattctatgccaaatggaataaagcttatagccatgtcatcaaaggtttgaaggaaattgagcccgatctgctagtcttctacaattatcccaaacaaatcagagcttcaatttattcaaccaatatgattgaatcctttaacaacgtcatcaagcgtaaagctaagcctaaggcagaatttccaactgaacagtcgcttgatgcatttattggcatccaggcaatgagctacaatgaccgttatttcaatcgaattcataaaggctttggtcaggttcaggacaccttagaatcctactttgattaaataaataattaaaaaatcaatttacgagaaagatctatttacacaaaagatttgacagtttccgttttccatgttgatagattgttactctggctctatatgatgagccacgtttttcaatacttgccataaatttaatcgtcctttcaaaagaaaagccgattatcttaccagcaataaagttagcagataaccgactatttctcaaatctttttcaattttgtttctttaagatcgatgaaagcttcgatacttttaatggtaaagcgttctgtgtgttctcctagtttaaatcttttaaagtcaggatcagagcgaaatactttatcaaaagtttggggatcaataccaatatattttgaagcttcttcgcgagttaataatttagccactattattctcctgagattgtttagttaccaatattgagataaaatctaggtagtaggtaatctagtcattgcttttgtctctattagcatgactagtatttttttgcgattttatcttccaaattgcttcggataatttatcatcagtgattagatcatttttaactttattagtattgcttttagtaagttgcaacgggataattcgtcttttcaactgttcaaaagaatcaatgacttgattagcaatattacattcaagataaaaactaagtggatcataaggggtagtgatgtaaatggcacgcgcatttagataacgatcgtgataccttgcgggagccattttgtctatttcccaaggatccaaaagggtaagtagttgaccatagtcatagtcatttggtcgcaagtcattaattactatgaatttttgccctttgtattcttgaaagtgatcccgttgactacctgaaatacagaaatcttcaggatgttgtttttctaaaatttcccgtactaacttagtcttaccaattccggaaacaccatatatccagtagaccttacaactctgacctttgaagtcctttaaaaaccgttgatgctttttgtaagctaggatgtcttcaatatgatctaacagtgttttatgttttgccatctcaagaacaccgatttcttcttgaagttcttctttagtgattttttcatttgaataatcatcaataaagttttcaattgcttgtcgtgatggctttttgactttttgtctaatctcattgattctatctttaaaatcaaatgaagctactacttcttttggatcataatgatgtttactcttagcattagtagtttcatggatcagatagctatagccattgttaataatactgtgccatgcttcaatatattgttcatgatcattgaaaatcttagatactcttgaaatggttttagcatctttgaaatgaagcattacatgatagtgaggtcgaatcttttaacttatctttactaaatggtaaatgatctaaatcttgggtatacataaagttgtgagaacgtattatttttttcacaattaaagatttcctttctattcaacacgaactacatattaactttggggctagataacaagttcattattactttatttttgtttatcagatggaaagcaattgcaagaagcagcagatatattagccaaggctaaggtgcatctatctatggtgatattttcaccttaaatcaaactgcagcagctatggttaaagttgctcaaggaggtaataagggtaaagtattactgcaaatgaatgaagcttaagttaacatgaaataataaatacatttagataaagaaagaccctcaaagattctaaatttgaatttttgagcgtctttttagattgctaatcattttaaaggtacttgtattacatttactcctgctttaataaattcattaattacactgttttctacaaaagtatcagttattaataaatcaatatcttttattgttccaatagtaaaattagagaatttattgaacttgctatagtcggcaacaacaataaccttttgtgattgctgaataatagttttattaacttctgcttcttccataactggtgttgaaataccttggttaatgctaattcctgcgcaaccaataattgcatagttggcacgtaaagatagaaatgctttagttgccaaatcaccgctcatgattaatttatgatgtatttccccacctgttaagatcactttgcttttagtattttcaaaatttccagcataaccattgttagtaacaattattatatcctttgttaataaatgtggaattgcatcaaaggctgtactactagagttaataaatactatatctccatcgtgaatatatctggctgcctcttttcctaagctttgcttaatgtaactaacgggctgagataatgggattttttctggtgcaacaagggatatgacaccacgcttttttgaaatcttacccatttttgacaaataatcacagtctcgtcgaatagtcatttcagaaaccttcatctttttgcttaattcagaaatagaaatttcccttgtgtgatttagtaaatcaatgatttgcttgcgacgttttttaattacttgaattgaatttttcatttttaatgatctctttcacttcaataaatacttactaatacttcaccagaaaagcattaacttttgaatttaaataaaaaacgacccgaactggttactattttaccattcaaaataataattcacatattttatgttataaagtaagtgtcaatgtttttgcggtagcctttaaaccattagtctaaccttaatttcttaaatatttatatgacttaaatttctgcttagcttgcttaaataactattgccagctacctgtgcggttaatgcgccatgctggatgcctaaatgaacttcatgacgcttctttaagctgtcacgggccgctgcttttaattcctgttcagtcaatacagttatttctgaatcttcaaactcgctgctaagccaaaattccagctctcgattcttgatgcagcttaagatcctaagcatgccttctgctccagattttgaccatttcttgccttgccccttaacacggtaggtatacttgcggtggttgctctcgcagcagccaatggctttagtcacagtcagttttcgtttcttaaacggcttaatatcgtcccaatgacgatcaatataattccttaggcgccccagataatcatgattgagctcggtattcaattcatcaattagtcggctttctgcagtggttaggatagttttaactttgtcatagctgtatttgtattccaaagcagaaatcagcttgccttgcaggtcaggcgcaaaatatagcctttctttgattttcttatttaggtgaaagacatccaagaaatgctcatgacgcttgcatagccctacaatgtcatcgaagtctgttttggcatatccagcaccgccatcggcgttgctaagaattacagtatcagaaagatcataagtattggccaggtactccttggcttcgttcagcgcatcaagtcggcttaaagaaacaaattccttggcattgattcgctttctgcgtttcttgcttatattgacaatgccttcacagacctgatagcgatgaaattccaaccggcttttagtgcctttgatcaccacgccatcgccttcaagatacaaaactgggacctttttcttagtgcctgcggcatcatatcttgaatctgcttcttggcccgctttaatatttttcccggccatttttaccaaattgcccacctgcatatggctaatattaaagccagacaggcaattgactgctagagcagtattgcgataagtggcaacgctgcttacttctaagatgtttttgactgctaaaatactgtagcgcttgtatttgtcaaagcccattaattcatccaagggataccttgcttgtttgcctgggcagacatatcttcttctgacatacctaacttcgccaaaagccatattgattgagcgctcattcttcttatcaatctgatagccctgtgctttaaccttggtaatcatttcatcatcaactttagctaaagccaaggccatgatttccttaatcaggtttaagaagaaacagattatttttctttcacgcttaatataattatcttcagactttataatatttgcgatttcagttacaattgaattcataaaagaccagcttctaatgtgttttttgttcttaacatcagactactggtctttttgtttgagctcaagtccaaattcaaaggacttgggcttttttaattatttattcaacttaccgtaaaaaattatacacttagtgttataaatgacttgaattttacaaaaattaacataaaatatgctaaattaacatatataatggttgaaagcactcacatctaagcgcataataacattgaagacgaggataagaaaattaaggaggatttattcatgtcagcaccaaaaaaaatagaagatgttaatttcaaaacttttgcagaaaacaatttcccagaatggggtacgttcttgaatgaacaaattgctgataagcaagtaccagaaaaaagtattgcaatgtggtggttaggctgtatgggggtttggattaagactcatgaaggcaccaacgttgctattgatatgtggaacggtactggtaaacatactcacggtgacggtaagatgcgtaaaggtcaccaaatgatgcgtatgaccggtggtgaagctttacaaccaaaccttagaaacaagccatatgtaattgatccatttgcacttcgtgatcttgatgctttatgtgtaactcacactcaccatgatcacttggatatttacactgcagcatgtgtaaacaagtattgcccagacgctaaatttattggacctcaaggcgttgtcgatgaatggatcgaatggggtgttccaaaggaaaagaccattgttgtaaagcctggcgatgaagtcaaggttggggccgtaactattaaggcaatggaagcctttgatagaactgaatttgttaccgaagatgatccaaacaagaagttagcaggtactatgccaattgaaatggctaaagttgctgttaactacttagttaagacttcaggtggtaacgtatatcactcaggtgactctcactattcaaacacttacgtaaagcacggtaacgaaaacgaaattgacgtaactctatgtgcatacggtgaaaacccacgtggtatcactgataagcttgacgactcacaagttttgagaatgggtgaagctttaaagacaaaagttattattccaatgcactatgacatttggactaacttctacagtgatcctaaggatattttagctctttgggaccgtaaaaagtaccgtttgcaatataaatttaagccatatatttggcaagttggtggtgaatttgattatccacaagacaaagataatttcgaatacatgtatgatcgtggattccatgatgcatttaagaatgatccagacttaccattcccagaaatgctatagtcccgtttttgttgattaactagctcaacgtctttaaccaaagctgttgagctgagggaggagacgctgatgttacgttactttttagaaaataatttattaaacattactgatgaacatcctgagacttgggaagaagcaattagagttgctggtaaggtaatgaagcaagacaagttagttactgatgattatattgattcagttattgctgatgttaagaaatatggtccatacattgttattgttcctggtgtggcaatgccacactcaaaggctgatagcgaaggagttttaggtactggtataggtcttacaattttgccagaaccagtttcattcgatgaatcagacccagataaaagtgcaaaattattctttatgctagcagctaaagataataatacacatgtcaaaaatattgcccatttatctgacatgttaatggaagataacatgattgatgatctttctaaggttaagaatttagacgattataaggcagtaatgaagaaacataatatgtgatatcggaagcggggagtataaatggctatattaaatattctatctaagatatgggattattttgctaccaatattttgcaacaaccagctttcatgattggttttattgtcttacttggttatatcttagagaaaaagaaatggtatgaggtcctttcaggcttcttgaaagcaacagttggatactttattttatcggctggttctgttggactgatcaatacttttagaccaattttagtcggattaaaagatcgttttcatttgaatgcgatggtaactgatccatattttggacagaatgcagttgctgccggaattatgaaagagtttggtagatcttttgccgatactatgcttttgttgttatttgcatacattatcaatatcgtgttagtaagattttcaaaatatactaaattacgtgctgtttttacaactggtaacgtgcaagtacaacaagcggctaccgctttctggttgatcttgttctgttttccaaaattaggtcatttacctattttaatcgttatgagtattatcttaggtttatattgggccgttggttcaaacttaactgtagatattactcaagagttaactgatggtgctggctttgctatcgctcaccaacaaatgtttggtatctttattttcgctaaattatcagaatttttggaaaatagagccaaaaagaaaggtaagaaagaagccagacgattagaagatgtaaagttaccaggtttcatgtcaattttcaacgacaatatggtatctacatcaattttgatgttaatttttatcggtgcaattttagtagtattaggtccagattacttagttaaagctaaatttatgcaacctggccaaagttttattttctacatcttacaaacttcattacaatttgcagttttcttagcaatcttacaattaggtgttcgtacattcgttaatgaattgactgaatctttcactggtatttcagacaaatggttacctggctcagttcctggtatcgatgtcgcagctaccttaggttttggttcacctaacgcaggtacaattggtttcttgtttggtgcattaggacaattcacaatgatcattttattgttgattttccactcaccaacaattgttatcgccggatttatcccgttattctttgataacgctgctatcggtttgtattcaaataaccgtggtggtttcaaatatgcaatgatcatgccttttatttctggattgatccaaataggcgggtctgccttaattgctacctgggtaggtatggcgaaatacggtggttacatcggaatgttcgattgggctacagtttggccattcttcacagtattgatgaaattcttaggctttgttggtatttgctctttaataatcattttggtaatgattcctcaattgcaatatcgtgccgataagaaaggttacttcatgattactgaagattatgaaggttggaagaagttacatggtaaagaatagaggttaattaaaatgaaaataatgtcagcttgtgctaatggttcgggaactagtttaatgctttctagaaccgcaagaaaagcaatggaacaattaggttatgaaattacagtttcagatcatacttctgtttcagaagctagaggaactgctagaaactatgatgtggtatttacatcattaccttttgtgaacatgtttgatgaagtaaagcaaaagggtggcgaagtaattggcgttaagaatgtaatgtcagttcctgaagtaaaagaaaagatcgaagcttcagatattccaaataagtttaagaaataatcttaggagaattaatttatggctttaccaatgttacaagttgctttggattgcgagagtactgctgaagctttaaatgtcgcaagacaagtaatggatcaagttgatgttttggagacaggaaccattctttgttatcaagatggtgtaaaggccgtatctgctttaagagcagtgggaccagataaaatagttttagcagatgttaaatgtgctgatgccgggactaagttcggtaaggcaagcaaagatgcaggtgctgattggatgacttgtattaacgctgctactgttcctaccatggttaatgctagaaaagaaattgaagttcaagttgaattatatgaaggctgggacaataaagaacgtatgcaagaatggcttaacaatggtattgatcaagttgtttaccaccaaagtagggatgcaaaatttgcaggccaaaaatggggcgaaaaagatgttgcaaacgttaaggccttgattgacatgggctttaaggtttcagtaaccggcggagttcatccggaagttttgaaattatttaaagacttaccagtgtattgttttattgccggccgtgatatcagaaatgcggaagatccacatgcgcgtgctaagcagtataaagatgaaattaagcgcatttggggttaatcattaattttactcatattaaaaaattccttaattagttttagaaagggcaatgcacgtaaaaacgtttattatgcattgctctttttgtattaaaaggcaggtataggttatgactgtaaactcattaggtatttacgaaaaagcattaccacaagatttatcttggaaagaaaaatttaatttagttaaaaaattaggcttcaattttttagaattttctgtagatgaaagtgatgcacgcttagcacgtttggattggaccaaggaacaaagaaaagaatttagagatttaatgtgggacactgacattcgaattaataatttgatgttatctggccacagaagatttcctcttggatctaaagatccagaaaccagaaagaaatctcttgaaatgtgccaaaaggcagtagatctctgtgtagatttaggaattcataatattcaaatggcaggctatgatgtttattatgaagaaaagagtgagaactctagagaattatacgttgaaaacttagctaaatgtgttcatatggctgcaaagaaaaacattatgctttcgattgaaacaatggatgatccatttattactaacattgcagatattaaacaatataaaaagcaagttagaagcccatggcttcaagcctatccggatttgggtaacctctctgcttggccacaaaatgatcctgctaaggatttagagaatggaattggtaatattgttgccatccacttaaaagatactctggcagtaacagatggttttgagggtaagtttagagatgttccatttggtgaaggctgcgttgattttgaaggactacttcgtgaattagtaagactagactataacggaagttttacgattgaaatgtggccaggtgataacggtgatgatgatcctgttgctgaagttaaagaggccaaagctttctttgacaagatctttaaaaaagttggaattgaacaagaacctgtagattagaaagtggaaaataaaatgttagaagatttgaaaaaagaagtctatgaagccaatatgcaattacctaagttaaatttagttacttttacttggggaaatgtttcagggattgatcgtgaaaaaggtctgttcgtcattaagccatcaggtgttccatatgaagaattaactcctgaggatatggtagttgttaacctaaaaggtgaagtggttgaaggtactagaaatccatcttcagatactcctacacatacctatctatataatcattttcaaaagattggtggtatcgttcatacacactcaccttgggctgtttcatttgctgcagctaagatggatattccagctttgaacaccacacatgcagatactttctatactgatgtgccagcagctgatgcattaactaaagaacaaattgaggaagattacgaaggtaatactggtgtcactattgtcaaaacctttaaagagcgtggtctcgattatgaagcaacaccaggtgctttagtttcacaacatggcccatttacttggggtgaaacaccagctaaggctgtttataatgctaaagtcttagaagttgtggcggaagaagactatcatactttgcaattaacacgtgctaattgccatttaccacaatacctacttgataaacactattatcgtaagcatggtaaaaatgcttactatggtcaaaataatgctcattcaaaagatcatgcaaagcgtgcctaaaactaaggggtaaaaaatgcttgaaaattatttttttgattttgataaaactctggctagttcaggtaaggcgtcattgattgcgacaaagcaggcatttaagttaaataatttagatgagccagatgatgatcaaattttagattttatgggtattcctgctgatgtttcattccctaaaatggctaatagagaattgtcagaaagtgatgcgaaaaaattagttgatacctaccgtaatatttatggaaagtatgaaaaagaaaatacacatttatatcctggaatgcgagatgtactagaggatttacagcaaaaaggtaaaaatttatttgttgtatccagtaaaagtcatgatattttaaagagaaatttagataatttgaaaattactcaatattttaaagactttgtgggatgcgatgaggttcagcattataagccagccccagatggtattttgatacttttagacagatacaatttgaataataaacaaagtgtaatggtaggggatgctcgttatgatttgcaaatgggcaaatcagcgtctgttaaaacttgtggagcagcttgggatgcttttagtgtggatagcttaaagaatgaacatcctgattatttgctatttcatgtggcagaattaaaaaatattgaatagagttcatatattttaaaattggatggtatcaattttgaaagtagttgaactctttagcaaaaatgatattattaacttgtaagggaaaacggttacataacgatggtctataggaggacatcatggctgtagattacgattcaaaagaatatttaaagagcgtcgatgcttattggcgtgcagcaaattacttatcagttggtcaacttttcttaatgaaggccccacttcttaaaacacctttagttgctgaagatgttaagccaaagccaattggtcactggggaactattgctccgcaaaactttatttatgctcacttaaacagagtgttaaagaagtatgatctggatatgttctatattgaaggttcaggtcatggtggtcaagtaatggtttctaactcatatctggatggttcatacactgaacgctatccagagatcacccaagatgaaaagggtatggctaaattgtttaagcgcttcagtttcccaggtggtgtggcatcacatgctgctcctgaaactcctggatcaattcatgaaggtggggaattaggttactcactttcacacggtactggtgctatcttagataatcctgacgtcattgctgctgttgaaattggtgatggtgaatcagaaactggtccacttgcagctagttggtttagtaacaagtttattaatccaattaaagatggtgcggtattaccaattttgcaaatcaatgggtttaagatttctaatccaactattgtttctcgtatgagtgacaaagaattaactgaatacttccgcggcatgggctgggatcctcattttgtttcagtctttaaaggcggtcgttttgacggtgaaaaggatccaatgcaggttcacgaagaaatggctaagactatggatgaagtcattgaagaaattaaggctattcaaaagcatgcccgtgaaaacaatgacgctactttgccacattggccaatgattatctttcaatgccctaagggctggactggtccaaagaaggatttggatggcaacccaattgaaaactcattccgggctcaccaaattccaattccagttgcacaagatgatatggaacataaggaaatgcttgaaaaatggcttaagagctacaagccagaagaattattcaatgaagatggttcacctaagaagatcgttactgaaaatacggctaagggtgaccacagaatggccatgaatccagttactaatggtggtaagaaccctaagcgtttgaacttgccagattaccgcaagtacgcattgaagtttaagccaggtcaaatggaagcacaagatatggttgaatgggctaaataccttagcgaagttgctgatcttaacccagacacattccgtggctttggtccggatgaatctaagtcaaaccgtttgtttgcacttcttgatgatcaaaagcgtcaatgggaaccagaaattcatgaacctaatgatgaaaacctagctccaagtggtcgtgtaattgattcacaattgtcagaacaccaagatgaaggattccttgaaggctatgttttgactggccgtcatggcttcttcgctacttacgaagcctttggccgtgtagttgattcaatgcttacccaacacatgaagtggttaagaaaagctaaggaacaatactggcgtcatgactatccatcacttaactttgtcgcaacctcaactgtcttccaacaagaccacaatggttacactcaccaagacccaggcatcttgactcacttatatgaaaagaatcgtccagaccttgttcatgagtacttgccatcagacactaatacgcttttggcagttggcgacaaggctttgaaagacagagaatgcatcaatgttttggtaacttctaagcagcctcgtccacaatggttctcaattgaagaagctactaaattagctgataaaggattgagttacattgactgggcttcaactgatcaaggctataagccagatattgtatttgcttcaactgaaactgaaccaactttggaaagtttagctgcaattgatatcttgcacaagcgtttcccagaccttaagattcgttacataaatgtagtagatgtgatgaaattaatgagtcctaaggataataagaatgctatctctgataaagagtttgatcgcttattcccaagtgacattccagtaatctttgcatggcatggatacaagactatgatggaatcaatctggtttgcaagaaaccatcataatatacatattcactgttacgaagaaaatggtgatattactaccccatttgacatgcgtgtcctgaaccaccttgatcgtttcgacttggctaaggatgctgttgaaagtattccatcattggcaggtaagaatccagacttcatcaatgaaatggatgacttgcttgctaaacaccaccaatacattcgtgataatggtaaagacattcctgaagtcactgagtggaagtggacaggtcttaagtaaaaaataaagtgtctgggaaaaaactaactcttagaccataataataggacgatcaaaattcttaagtgagttttaatcgtccttttttcttttaaaattaaataaaaacggtcttttggtcattttctgttccaatatttgcttatattcatcatcatgaaggctattccaacatcggtttcaactttctttttgcctcttagatgtgtttgccttcttcgctttgaagaacttcttttgctttttcttttaaatactgccagttagggttatagcgtacttgacgctggcgaccgctagctgtcttagctaattgttccagttctgacgtaagcttcaactgcctggcccttcagcttatcatgatacttttcgacagccttgcgccaaacaaaagtgtagcggttagcatcagcttcaattttagtgccatcaataaaaacagccccctcgttgatcagccaacagattgggaaagtagataaagctcttcttaaccagttcattggcatgactgctgtgtggtatactggtcgacctgttttagcagggtgtaaagcagaatagcttctggaatcgaatccacaatccagctgatagcattagccaagtgattgctgggaatggtaaaatccaaattgagtgttaaagctgtttgacctgtgatatgatttttgtacatattagtttccacctttttgttttaatgaaataagaggccacaaatgatcacattttttatggagaaatttaaaatgttaaattttagatcatatgaagacgcagatttcgaaaaattatgcaacatccacgatcaagcgcgaaagcaagaattaaaatttgccaatcttgaagctgcatttattccattcaaaatagcatcaaagaaagagcaattatttgaagactatcaagttcctgaattgtcaaattaagtgcaacagttaggttatgaagagatatattgcttgaagagttcctctgctgtgtgatattggaggattcggcgatatttgtggttaatggcatcagttgcctgttgaacataagcttttgacttgtctttcatgctcttgcccttagggaagaattgacgcaaaagaccattgcagttctcattggtgcccctttcccatggagaatatgggtgagcaaagtaaatctggcagcccttgatcttggtcatatccgcaaactcagagccattgtcaaacgtgattgatttaaaccaggcaggatgtctgtcaatctccttttgaagcagcctttggcatgtgcttgcccgatagtcaggaatcttgataactacttcaaagcgtgtggttctttcagtcaaagtcattaaagcaggctgattcttgcgtctgacgcctttaaccagatctccttcccagtgcagcggagcttttctgtcttcaacctccttaggacgctgttcaatggaattgccaagatgcttcttgtgcaaagcgtgaccgccatggctgtgatgacgcttgttcctgcgtcttttgagcttcataggcagatcaatattgcttatgtccagcaagccctgatcaatatagcgatagacggttggtgtgctgggacaagggtagcctggcatagtccttttgaattcaccaacgaactcatcgatgctggtggcatcaaatttagctttaaagcgtctggagagcattctcaaaaagacagcataatgcttcaatggattgcgctgatagcagtttttgcgacgcttctcataataaatctgtgcagtatcagcgtaatagtgctcatacaataaatagctgctgtctctttgcaggacgcttccgcgtttgatttcgcgactgattgtcgacttatggcagccaacttcttgagcgataacagtacgggaagttatgccggaatccagcattgcttgaatttgtccacgttgtacgctggttaattgatgatagtgcttagaaatgctagaatttgaattggtcatgaagatcttcctttcttgatttttcgtcacttcaagtttaggtcttcatggcctttttgtttaacacttagtgttgcacttcaattttaaatccgggagactatcaagtttacgttgcaacaaaagaaaataaagttgttggttttgtcggatttaacgaagaagagcttggctggctctatgttgatcctaaagttcaaggacaaggtattggtagtaaactgattgattttacgcttgaaaattcgaccaggccattttatttagaagtgcttgagggcaatcctgcacaaaagctttatctcaaaaaaggtttcataacaattaaacatgaaagtggcaagatgccaggtaatgaatcatttagtgttgaagttgacctaatggaatataaataaaacatcccaatcaggtgtgttttttgttagacttataaaaaatgaagctagtcaataaagtattgtcttgtcattagaaagtactacatatgaagtatatttcatgaagtccgcttcatattttagggatgatgattatcaataataaaattaaggaataccgcaaaaaacatcaacttacacaacgcgagttagctgaaaaagttggtgttacagaacggacaataatttcattagaaaagggtcggtacaaaccatcgattgttttagcttataaattagtacaattttttgagacagatattgaaactttattttgcttaaatgagtatgtgaagaatgagcaagccaaaggaaggaatgcttacaattctttttgcgattctatcagtcatacagctcttagaattaatttatgatgttgcaaatagaaaaagcgtcaattatattcaagatgttatttggttaatattgggcatctgtttgacagtcggttatttctatagtactaaatatatcggtatagccaagattgaagaagatgatgaacgcgataaatttattcaaactaaaactaataatcaagcattcaatattttacagtgggtcctttttgttttaggtgcagtaacgataataattgatgttaatctcggccaaatgggattagattctcgtgcaatggttattatagttgtaggcgttgtattaatctttttatgggcattttcttggattttgcaattaatcttaatgataattaattatttttgcaattgagactacaaaaaataaagcgactggattagctctggtcgcttatttaaattttagtatggcatttctttaaaaaattagaatatcgatctttttcaccgtttaccttccaatattaaccattcaccgaaatttttaaatttaaaatattttttcgtctatactgataagcaagaaaggagaaaaagggatgaaggtaaaatttaacattgataatcaattagcgggagaaagtgctgaattttggttaaaaaagatgactaataaattcagtcaattgggtaaagaattaagtggtgaacaagacacgatttggtgcagttatgatgatgaaattattcctgtgaagtttgaaaatatttatttaattcaagtcgaacaagagcaaactttaatttatgacaaaacacagagttacaggtataaagggcaattatatcaggttaaaaatattttgccacataattttttaatagcgtcaagaagtgcaattattaattatcaaaaaattgatcatttggaagttatggatggtggcaatattgatgtcattatgaagaaccaaatgcgggtacaaatttctagaagaaaaattaaagacttgaaagagaggttagggttatgaaaagaatggaatctttcttggtaagtggaataagtggcatgggaattggattaacttggtattcaatagtaactttatttcaaacgggaacgaattggaaaaatgctcaaattccgtttacaagtttgctcttttatttgattgtctcttttgtgatgggagcatttttcaatttgacaggattgatttttgaacaaacgcaatggtcactacgaaaacaaattattgtaaacttttttgttagctatgttgccttttttgcttttgaattagtgattaatgatttggctttatcggttcatttcttcttagtaattactggagtatttgtcttgatgtacttgctcgcttatggtttgtactttttacaattattgcgagatgttaaacaaatcaatcaaaaattgaaagaaaagtaaataatcaaaaacgatcaagcctaaaaatcttgatcgttttttcgttggttagataaaaattataaactgtcttgaatattatcagctaagtagtcataaagcataccatgctttaattgcttagtatcaactcccaaagcttcagcaattgcataggcaaaggcccaagcggtagcaggaccacggcttgttaaaattttatgctctttatcagtaacggtgattttctctgaaaaatgagcacttggggcatcttttaagcattcttcttcaatgcctggataacaagtgaagtccgcatctgccaaaacaccatagcgagcaagagcacgtggagcagcacacattgcggcatcccacttgccagcttcatgacgcttaatcatcagatcacgtaatttttcattatcgcgtaagttagcagaaccagtcatgcctcctggaaaagcaaccaaatcataatctaataaactgtcatctacaactttgtcacaagtgatttcaatatgatggtcaccatctacttttttacttattaaacctaccatatcgcattcaacgttaagtctacgcaatacgtcaacaacgcttaaaccttcgacttcttcgcaaccgtctgcaaatactacagcaacttttgtcataaaatcatcctttctataactattttaattatctacttacattagatctaagtaaaatgaaagatctgctaatttgcttaaatgaagagtaggatgaggtgaaattggtatcttgtcttttttaggtgccagccataatgattttagattggcattttctgcaccttgaatttcttcatccagattagttccaattactaaaactgtgtctggatcaatatctggattgtctttcagaatcttaaagaaaatatttttgcttggcagcttgtccgtaaaatcatcggcgaaataagcattgtcaaatgaagaaagcaattctgtaggtgcaaggcgcggttcgatttgagtgcgcttttctttagcaagcaaaatcaaatgcagcttgccactgacttcatcaataaagtcgatggcgcccttgactaacctggtttgatccttcattgcatcatcaaaaacagttcgcgttttagaaagatcttcttttaaaaatgtagataaagctaaatcgatttgatcatcgctagataaatttttaaattctttttctaagctagtgtagcgtagtcgctcagctggtccccagtctaacccataatgttttaaagtttgccgcagcgcagttttttctgctaatttttcatttaataaactgccttctggaatgaaaattaaggtttcaaatgtagtcatgaataaacttcctttgtgttagttcctattagaattataatgaactagacaattttaggaaaggaattaaaaaatgacaatctggaccgtaattttcttattattaggtggcgttgcaggtggcttattatcgtcagtggcctcaatggcatcacttgcatcatacccagttttgctagcagtaggaattccaccagtatttgctaatgtaactaatgatgcggcgctaatttggactagcatcggttcaactgtatcttctactaaggagttaaaaggacattggaagcaagttttgttctataccatttttacagttgtgggatcaattttgggttgtattttgcttctatcttttcctccaaagatttttgaaaaagcagtaccattctttattgctttctcaggattgatgattattgtttctggtaaacaccatagtttaaatactaagacacagcctacttggcttaaaataatttattttctcgcacttttagtcatggggatgtatacaggttactttggtgcagctggtggagtcatcgtactagtacttttaacttacattaccaatgataaatttattgttattaacgctatcaaaaatgtgatttgtggttttgctaatttagtagccttgattatatttatgtttacctctcatatttattggcttcaggcaattcctttggcaatcgggatgttcattggtggctatattgggccagctattttaagacgagtaccggaaaagccagttcgaattttcattgcaagcttggccttcattcaagccggttacttcttttatacggcatatctgcaataagtttggtacaatattaagcaatgaaaagggggctaaggttgatggcaacagaagtttatttggtacgtcatggtgaaacaatgtttaaccaattggacaaagttcagggttggtgcgattctcctctaaccgtgaaggggattaacgatctaaagagaaccgctaaggccttgagtcaagttcactttgataacatgtattcatcggatttgaagagagcaattgataccgttcacttgatgaaggatgctaatgtggtctcggatattggtaaaattaaaaagctgcctgaatttcgtgaggtcttctttggaacttttgaaggcgatgatattaaccagacttgggaacaagtagcactagccgcaggaattgaccatgaagatgatgtaactaagatcatcaatcaggtaggcttgcgcaaatttcgtgcagcaacaaaaaaggctgatccgcgtcatttagcggaaaatcaggatgagttagatgagcggatggtacgggcaattgacgttttgcgcgatttaactaaagatgaacaaagagttttgttagttagccatggtgactttattaaaactttgtccataaaatattggaataagagtaatggcaaaaacgatattgtttttccaaataatgggagcgttactcgtggaattttgcacgatgacggttcatttgaaattgttgattataatgtagatgctgaagagctataaaagtcctactgccgaagtagggccttttttggtacactgataacgaaaggaaaatattttatgaataaagatcatacaactaagcgttatgtcttcgtaactctactgaatgttgttattactattgctgaatttataggtggtattttttcaggttcattagcactgctttcagatgcatttcataatctgagtgatgttggtgcaattattttatcttttgtggcgcacctgattagtcgcaaaagtcgtaatcagtttaagacctttggttatgaaagagctgaaactttagccgcttttactaatggcgttatcttgatcgtgatcagtgtggttttgtttgttgaagcaattcaacgtttctggaagccggaacatattcacggtggcattatgctgattgtctcgattattgggctggctgccaatattatttcaatgctagcaatgcatagcgattccaaggctaatttgaatgtacggtcaacttttattcatatgttaagtgatgccttgtccagtgtagcggttgtaattggtgcgatcttcatttacttctggaatgtaacttggcttgacccagttttgactattttagtttcaatctttgttttgcatgaagcttatgaaaatacaatgaaagcagccaatgttttgatggaatctaatcctgatatcgacttgaatgaagtgaacaagattgttttatcgttccccatagttcaaaatatccatcatgtccatgtttggcgctacagcgatgactttattatgatggacgcgcatattaatgtagccccaggattaagagccgatgaattagagcagctataccaagatattggacaggagttacaaaaagagttaggtattaatcatattaccttacaagcagagtgcgagcgtggcagaaaagacaagatgatcgttccaggccacggtattaacgaagattaggtgaaagaatgtttaatgttaatatttttacagcgattattgtattgattatgggtatttatgacatgtcctatgcttttaataggcgtaagcaacctaccaataaaggcggcattagagcctttatggctttaggaattatcttcacgatcgcaggaattgttatgatcgttagagtattaatgaagtaaggaatcttagaatggctaaattagtattagttcgacatggcgaaagtgtggcaaatgctgccaatgtttatactggctggaacgatgttccgttgactaaaaaaggtgaagaacaagcagaaaaagctggtgaattgattaaaaccatttcggattttgctcccacccacattcatacttcagtcttatcccgtgcaattgtgacagcaaatatagtagccgatgtctgcaatttattatggctaccgatgactaagacctggcggctgaatgaacgccactacggcgctttaaggggccttaataaggacatttcacgtaaagtatttggtgtggaacaagttctattgtggcgacgtagttttgattcagttccacctaagcaggggtcgccaatgattgatcgccgttataagcattttgatcagcatttgatgccacgggcagaaagtttacatcaaactcagaaaagactcatgccatattattatgatcatatcgcatctcgattgatgaatggtgaagaccaactgatcgtagcccacggttcaagtttgcgtgctttgataaaaaagctagagcagattaatgatcatgacatcgtaaaactggaagttcctaatgcggaaccgattgtttatactatggatgatcacttaaagattattaacaaacaaattttacgtaaataatgttaaaaatgcaccttagtgcatttttttaatgctctaaatgaggttttacacatatctatggtaaaatctattatgatttctagtatatttagtttggagtattaggcatgcgtaaattatttttattacgaggtgcacctggctccggtaaatcttcttttattactcgccatcacttaaatccttatgcgatcagtcgtgatcaaattaggctactattggcggatttgacagtttactatcaagaggatgcggatgttttacaccaagtcattccgcggcacgtaactgtgcgtactgagcaaatggtggatcaccttgtagaacacaagatggaatatggggaaactgttattgtggatgggacgcatatcgttccaagtgcgattgaacattttaagccttgggtagacaagtatcactatgaatgctttgtagtagatctgatgcaacatactaccttagagagtttgcttaagcgtaatcagactagaatgcattacgattgggttaagcctgaagtggttaagcaaatgtatcgttcttatgaagcacatccagaagtaccatactgggcacataaagttgtgccaaatcagatggatcatgcgttgtcacagcgtgagacaaatttagatcgttatgctcatgtgattgcggttcctgacatggtagatgaagaagattttccacatgtgcatatctcgaacttttatttttcatttaatgacaagtttacagaaaagtatggaacttatcgaaatgtagtttcaattgctaaaactgaagatgaagcagttaagcagttcaagttgccatattttgtctttaagtttcatcacaagcactttttgatttcagcttatccaattcgaaatgagatgttggatccgatcagaaaggttaagggagtttggacatattcaactggtttgtataatgtagcggattttgtgaaagaatttccggaaaataaaaagcaacatgtgcatcagttcaacttaagtaagttagatccaacccgcttattacatatttggtaaaaaagacgtagttagaacattttatctaactacgtcttttgtgtaatttacttatattttgttttacttcaatttgccggccttagctaaaacttctttagccttttcaagtgaatggtgttcttcacgataacgcttgatgtcatagccatcaacatcggttaacttgctaagtctatcatcaaggtctttgaattctttttcaagatccttaatgacgccttcttcatcttcaacgtaaacatactcattttcatcagctttggcatcaatcttagcatcgtattcgccgacttttctagcatgtttcaaaatagatttaatatccttaatcgtttcatgttgtgcagtacggtgacgacgatcaggtactgaatcttcaattctagcaaggtgactttcagcatcctcaatcttcttagaaattctatttaaggcttttaattgtctttttgaataatctgtcaagttttatacctcctagataaaatgataagctctactaaatgcgctttcattgtaattagtaacgaaggtataagcaagaattaacacttatgaataaaaagagttacgccttaaaaacgtaactcttagaagttttggattaatatttaaaagctaaggcacccattggatcccatggcaataattgaattgggttatctttgccttcatcgtaagccttcttaagatcttctggtaagaatttcttgttaataactgcttggtaaacaaatgaatcaaaccaagaatcactcattacgaagtaacccttaaagccagttttttcaccccatgagttttcgatcttccatttagttggcttaccgtcaacgatatcaacaccggtaatcaccatggcatggtccatcatgctttcaccagaatcaagcatgtcggctttagacatagtgaagtcagcatcaaataattgatcacggcggtaaaggttagtatcaagaagtccagcacggcgttcagaatccttaactacgtttgaaccgaaccaaacaacttcgccactcttcaattgtttaatgattaagtccttcatttcatcaactttaaggtttaagtggcgaacttggcgaccgccttcaacgttacctaagtattcaactgagaataccttgtggaaaggtttgtcgttagttggagcattgatagttgagatatggtttgctaaatccatgccaacgtacttgtcaaagaattcctttggggtaatgtccctgtcaatatggtaattcttgtcatcatcgcggtattcgaagttgaacttctttggtggaacacccaatgaagtagccaaaatacggaagacatcgtttagcatttcttccttgcgagcttgtacttcatcttctgacttgccatcttgaactaatttacgtaactcaagaccatctttacgaagcaaagtatttaaagtgtcgtttaatgcacttgaattagtagcattagcagtttctggataaacactcttaggaacgataccatatttttcaataataccgcaaagcatgtcccattgaccgccgtcttgttgaggagtcgcaaataagaatgaaactttacgatcgcccaagtccttatcagcagttgcgatcacattttcaaagaaccagttagacttttcaaatttatcccagaagttagtgtaattttgagataattcgaagtcctttaacttaaatttcttttgtaatgggtgacgcatagtgtttaaagcactgaacatccagcagcgaccagactgcttttgatcggcagggttacctgtatcaatttcgattgagaaggttggatctaggtcgatcttagtttgtaagttttgactagctttgtagataccgttttcttgagcagcgtgactagccacatcaaaaacagggtggttagctaagtcttgttcaaatttattaatagtatcattgttgatttcttttaccataaaaaaatcctcctttataagtacttaaattaattttatcttattcaaaatgagtcgtctaataatcttatcgattaaatggacgatgataccaaattttgtgaaattgaggatgctgggtgaagtagtcaatgatcataggatcaagcggcaaaatgggtaagttagtttcttgagctaattgccaaactttttgcatttgtttttcaagcaaatcctgactattaaattgtggattaataaaaaaatggttcattatccagacattactgtctttgcgagcgattttatctaaggtaacgctagataatagtatgtcttcttcattttttatagtgaaaatttggtgcgtatcttgcttattcataaaaaattccccggatttaaaattgaagtgcaacactaagtgttaaacaaaaaggccatgaagacctaaacttgaagtgacgaaaaatcaagaaaggaagatcttcatgaccaattcaaattctagcatttctaagcactatcatcaattaaccagcgtacaacgtggacaaattcaagcaatgctggattccggcataacttcccgtactgttatcgctcaagaagttggctgccataagtcgacaatcagtcgcgaaatcaaacgcggaagcgtcctgcaaagagacagcagctatttattgtatgagcactattacgctgatactgcacagatttattatgagaagcgtcgcaaaaactgctatcagcgcaatccattgaagcattatgctgtctttttgagaatgctctccagacgctttaaagctaaatttgatgccaccagcatcgatgagttcgttggtgaattcaaaaggactatgccaggctacccttgtcccagcacaccaaccgtctatcgctatattgatcagggcttgctggacataagcaatattgatctgcctatgaagctcaaaagacgcaggaacaagcgtcatcacagccatggcggtcacgctttgcacaagaagcatcttggcaattccattgaacagcgtcctaaggaggttgaagacagaaaagctccgctgcactgggaaggagatctggttaaaggcgtcagacgcaagaatcagcctgctttaatgactttgactgaaagaaccacacgctttgaagtagttatcaagattcctgactatcgggcaagcacatgccaaaggctgcttcaaaaggagattgacagacatcctgcctggtttaaatcaatcacgtttgacaatggctctgagtttgcggatatgaccaagatcaagggctgccagatttactttgctcacccatattctccatgggaaaggggcaccaatgagaactgcaatggtcttttgcgtcaattcttccctaagggcaagagcatgaaagacaagtcaaaagcttatgttcaacaggcaactgatgccattaaccacaaatatcgccgaatcctccaatatcacacagcagaggaactcttcaagcaatatatctcttcataacctaactgttgcacttaatttgacaattcaggttcataaaaaattccttttttaaaaaataatctcattttttttgcgtaataaataatagagagctatttattttgtgttgactaaaaacattgtaaaatagataactgtcaaaataaaagataaatggagctttggaatgaaaacacgtggatttgaagtagtcaaaaagtatcaagatcaggaaattaatcttcctcgcagacagaccctagccagtgcaggctatgacatcgaagcggctgaagacattactatccctagcatttggcgactaaattttgtgcgaatttttaggttgattagaaatggacaccagctgtatgagcgcgactatgagatggcggatcagattttaaagccgttgttagtgccaactggacttaaagcttatatgccagaagatgaagtgttgattttagctaatcgttcatctaatacttttaagcgtaatctagctttgccaaatgggatcggcgttatcgatgcagattattacaataatcctaacaatgagggcgaaatttttgtacaaatgattaattatggcgtacggcctttgcacatcaagaagggagaccgtattgctcaaggcatttttatcaaatacttgaagaccgacgatgatgatccaattagtcgaaaaagagttagcggctttggatcaactaatgaaaagaagggtgattaatggctagagtaaaaacacaatataagtgtcgttcttgcggctatatttcggcaagttatttaggccgctgtcctaactgtggtgcctggaatcaatttgaaaaagaaactgaagaagtgcaaaagcgttctactaaggcaactgctagtcgtttgattcagaagactggattaaatgaaccggtaaagctggataagattaaagctgaaaaagaagaacgaattgtcactaaatctgaggaattaaaccgcgttttaggtggtggtattgtaccaggctcactagttttaattggtggagatcccggaattggtaagtcaaccttgatgttacaaattatgagtgacttatctgaaaaatataaggtgctttacgtttcgggagaagaatcagctaaccaaatcaaattgcgggctgaccgactgggtgtaggtcaaagtaatatgctcttatatccagagactgacatgcatgatattcgcgaacaaatcaatgatgttaagcctgactttgttgtaatcgactccattcaaactatgaatgaaccaagtcttgattcgatgactggctctgcctcacaggttcgtgaagtaacaagtgaattaatgaaaattgccaagatggatgccattacagtttttgttatcggccacgttacaaaagagggtgcgattgctgggcctaagatcttggaacatatggtggataccgttctctattttgaaggggatgaacaccattcttaccgaattttgcattctgttaaaaaccgttttggagcagcaaacgaaattggaatgtttgaaatggttaatgaaggcttaagagaggtaactaatccatcatcaatttttctggaccaaagattacctaattctactggctctgctgtggtggtatcgcttgaaggaactaggccacttttagcagaaattcaggctttggttactccgacagcttttggctatgctaaaaggaccacgtcaggtattagttttaacaaagcttcattgctgctagcggtgcttgaaaagcggggaaacttaatgttgcagaatcaagatgtctatttgactgcaactggtgggattaaattgaatgaaccagcaattgatttagcaattgccatggcagttgcatccagttataccgataaagaaatttcgccgacagattgttttgtaggcgaagtgggcttaactggtgaagttcgccgagttgataaaatcgatgcacgagtaaaagaagcggctaaagtagggtttaagcggatctttattccacggcataatatgtattctggattaaaagatcatggcattgaagtaattcccgtttcgagtattccccaagctttaaaattagtttttggctagcattaattgaattcttactatataacgagtaaactaagattgtttgaatttactattttttgaaagaggcatgaattttggctaaagaaaaaatccgtgtaagatatgcaccaagtccaactggtcacttgcacattggtaacgcacgtactgcactttttaactatttattcgctcgtcataacaagggtacgatggtcttgagaattgaagacaccgaccaaaagcgtaatgttaagggcggttctaagtctcaaatggaaaaccttcactggttaggaattgactgggatgaaggtcctgataagggtggcgactatggtccttatcgtcaatcagaaagaaaagaaatttaccaaaagtatattgatcaattgatcgatgaaggtaaagcatattactcatacaagactgaggaagaacttgaagcacaacgtgaagaacaacgtgctgcaggtgttgcacctcactatacttacgaatatgagggtatgactgctgatgaaattaagcaagctcaagatgaagcaaaggctaagggcttaaagccagttgttcgtatccacattccagaaatggaaacttattcatgggatgatattgttaagggacaccttgagtttgaatcagacactattggtggggatttcgttattcaaaagcgtgacggaatgccaacttacaactttgccgtagttatcgatgaccacttgatgaagatcactcacgtacttcgtggtgatgatcacgtttctaacacacctaagcaattagttgtttatgaggcacttggttgggaacctcctaagtttggtcatatgacattgatcattaattcagaaactggtaaaaaactttctaagcgtgacgaatcagttcttcaatttattgaacaatatcgtgatcttggttacttaccagaagctatgtttaacttcattactcttcttggttggtcaccaaagggtgaaaacgaaatctttaacaagcgtgaattcatcaagcaatttgaccctgcacgtttgtctaagtcacctgctgcttttgaccaaaagaaacttgaatggattaacaaccaatacatcaagaaggctgatcgcgacactttgcttgatttagctttgaacaacttgcaagaagcaggtcttgttgatgagcatccaacaccagaaaagatggaatgggttcgtcaattggttaacatctactcagtacaaatgtcatacactaagcaaattgtagacatggctaagattttctttgaagaagctaaggatctttcagacgaagaaatcgaagaaatcaagaatgatgatggccgtggtgtaattgaagaattcaagaagcaattagacctcatcccaagatttacttcagttcaaatcatgaacgctattcaagcaactcgtaaggctactggcatcaagggaagaaagctctttatgccaattagaattgctaccacgcgttcaatggttggacctggtattggcgaagcaatggagcttttaggtaaagaacgtgtattagaacacattgatttaaccttgaagcaaatgagtgctaataatctttaattagataaattgaaaaagaggctgcaaataaatgcagcttcttttttcatctgctaaaataaaaattagttattttgacagaagggacaagtgttagccgtgagagtttataatacactgacgcgtaaaaaagaagaatttaagccattagttccaggacatatcagcatgtatgtctgtggaccaacggtgtataactatattcacattggtaatgccagaagcgcaattgcttttgacaccattagacgctattttgaatataagggttatgacgttaagtatgtttctaactttactgatgttgatgacaagatgatcaacgaagcgagagctgaaaaaacgactgtacccaaattggctgaaaagtttatcaatgcttttttggctgatacgacagcgctaaacattgagccggcgactttgcatccccgtgcaactcatgaaattaatgacattatcacttttgttaaaagcctaattgacaatggctatgcttatgaagtagacggcgatgtttattatcgtgccaaaaagtttaagcattacggtcagttaagtgatcaaaatattgaacagcttgaagagggtgcttcagagcacattaacgatacagaacaaagccgcaaagaagatccaatcgattttgctttgtggaaggcgcaaaaggaacccgatgaaattggttgggattcaccatggggcaagggacggccaggctggcatattgaatgttctgtcatgagtaccaaatatttaggcgatacgatcgatattcatggtggtggtcaagaccttgaatttccgcaccatgagaatgaaattgcacaaagtgaagctaagaccggtaaaaagtttgttaattattggctgcataacggttttgtaactgtcggtaaagatcaggaaaagatgtctaaatcactgcacaatttcgtaacagtgcacgatattttaagggaagttgatccgcaagtactgcgcttcttcatggctagcgtacaatatcgccgccaaattaactattctgctgaaaatttagcacaagcagctacaattttagatcgctttaagaatactgtgactaatattaattaccgtctagcagatgatacagctagtgaagaatcagccgaattagcacaggcgattatggcaactaacgaaaaatttgaacaggcgatggacgatgactttaatgtccaaaatgctttaacagctatctatgatttgttgcctgtagttaatgccaacgctaatgctgctagagctgacaaacaagaattgcaaaagtttaaagagaaattagctagttggttattagtgtttggcgtggatactaataagctttgcgttaaaaatgctggctccaatgacgatgaaattgacgctttagttaaaaagcgtgatgaggctcgagcaaataaagattgggcaactagtgatcaaattcgtgatcaattaaaggaaatggggatcactattcaagataccccacaaggaactaggtggactcgtgactaaaataaaaaaactagcggaagaggatgttaatccggatactttaaatggacaaactttagcctatttaggggatgcagtgtatgaagtaattattcgcagacacctagttaaaggcggtatcgttaaaccacaagtattgcagcgtgaagcgactcactatgtttcagctaaagcacaagctgcgttggtaactaagatgcaagatgaagaaatgttaacggatgatgaattagctgcttttcgtcgtggacgtaatgctaaaagtcatactaaggctaagaatactagcttgaaaacataccaattatcaacaggctttgaagcaatgattggttatcttgatttactggggaaaaatgatcgagtggcagacttaagcaagtggtgtattgatactgtagaagaggacgggctgaaaaattatgacttcaaataaagattttgtctttggacgccatgccggacttgattatttaaaaacacaaagtgccgacaagattaataaggtttttttgcaacacggtgtacaagaagaatttgctaatcaagtttatagtttagctaaaaaaaagcgtttagttgttcaagacgtgcctaaaaataagcttgatcgtttggttgctggtggcaatcaccaaggtctagttttagcaatttctagctttgaatatgcagatttagatcagttgctggacaagtatgatgcagaaggtaaagaaccatttttattaatgttggattctattgaagaccctcacaatctgggatcaattttgcgttcagccgatgctactggcgttgatgggatcattattcctaagcgtcacgcgactggcttaacttcggtagtagctaaaacatctacaggagcaattgattatgtgccagtagcgcgcgttaataatttagttcaaactactaaagaactgaagaaacgcggttactgggtctttggaactgatatggcaggtactgattatcgtgaatggaatgcccaaggcaagactgtactggtaattggtaacgaaggtaaaggcatcgccccattacttaaaaagcagatggatcaaactattactttgccaatggttggtcacgtacaatccttaaatgctagtgtggcaaccggggtattgctttatcaagcttataatagtagaaatccattagtaaaataaacagaaagtagacaaaagtgtgagttttgtctacttttttagatacataaagctcatttctgtccattaaacatgtgttttcttctcaaactcaggggacagtctgtattctttgaggtggaggataaattgaatgattaatgaagagaagctgattaagaaagtacgggcaggagatgaccaagctttagaaaaattgtttcatttatatgagccgttagtaaattcaatcgtgaagcaattctatttgcatcattatgatcgcaaagattgggatcaagaggcaatgattgtttgttatgaagcagcactagttttctcgcctcaaaagggaaaatttagcagtttatataaaactaaattgtttaatcatgcacggaccttggtacgttacaatatggcacgtcgcaggcaaatctatagtcaatcgattccgctagaaaaggcggacattcaaggaagcgtgaatgaaccatgccgctctgaattatcgattccagttgatgagacttacaataattttgttaatagcttgtcacacgttgaattaattgcattattaaccataattggcgagataagtacagagtatgcgattgatcatctaaatattgaagcaatgaagctggtcagagctcgagcacgaactttacagaaaatgcggaaagtgcttttttgatagctgatcaaaagaaagtgcggtataataagtaatgtagaatattttaggaggtaatttaagatggcagacgaaattattaagactgcattgttagaccgtcacatgaaggaagcttttgactggagtgattcagatatgccagttagagatgccctttgggactactttatggaaaagaatggtagagataccatgaagacggaagaagatatgcttccatttttgaaagactcagacgataaaatcgaagccttcgttaacgaaaatcttaagaagtaaatccgactaaaaaacaatgttctacgcaccgtggtcacgcatagttttgaccactaagacagctaccttctccggtggctgttttttatactaaaattaagaaagaattttaaagatgaaatatataattggcatagacataggaactactgcgactaaaggtgtgttgtatggcgaagatggaagtgaagtagctaaattggcaatttcctatccattgattcaggaagaagcggggcaggctgaagaagatccacagcttatttttgacgcggtacagaaaatgatttatcaattaagtcagaaagcatctggtcaaattttggcaatttcttggtctagtcagatgcacagcttaattggcttaggtgaaaataatgagttactgacaaacagcattacttgggcagataatcgtagtagtgatgtagtgcagcgggcaaaaaagtcgggctgggcaagaatgatttatcagcaaacggggatgccgccacatccgatggcgccagtgtataaattgctgtggcttaaagaagaacagccaacactttttgcacaagtaaaaaaatggattagtatcaaagaatatattatttggggcttaactggaaaaatattaactgatacaactatggctgctggcagtggaatgatgaatttaaaaacgctgacctgggatgaaaagatattggctcagattgggctagatcaagttcaattgccgacaattgctgatcaacaatctactgtgggtaaaattattccagaatatcgtgctaaattgggtttaaatgatgaaactcaaatcgttttgggcgcaagcgatgggtatttgtcaacgattggtgtcggcgttttggatgagaaagattttgcattgaatgttggcacttctggtgcggttagagtaattgcaccgaaggcaattgttgatcaaaagaatcgctttttctgttaccctgttgacgccaaacattatttgcttggcggccctgtaaataatggtggaattgtgttcgattgggccagaaaaacaatttttggcccagatgaaacggcagaggacgtcttaaatgtggcacaaactgctccggctggaagtaatggattgttgtttcatccttatcttggtggtgaacgagctccaatttggaatgctcaagcacgtggatcttttgttggcttgacgcgaaatcacactaaaccgcagatggctagaagtgttttggagggaattgtttttaacttgcttggcgcctctcaaggattgcttgatcaagtgggacagcctcaagctttacgtgttactggtggctttgtgcaaagtgattttgttagacaattaatcgcggacatttttaacttaccagtgattgtaattaaaaatgagcagtgtggtaccctagcagctatgtttttagctaaaactgcattagaagataagccagacctggaaaagattaaaaagcgtactgccgaaagccaagtttattttccaaatccccaaaatgtagcgatttatcaagaattgattctcgtttatcgaaaaattgagcatgaacttgaagcctcttatgaagatttggctcagtttcaagataagcatccacagaaatttgagtaaaacaaaaaagacgcattgcgtctttttttcatagattgattaactattaagcattttcaatatcttcaacaatctgatcaactgtcatacgattgtctttcaaaatttctttcaaaggtacttgatcagtatagacacgtttttggccgtagttgagtactttaatatccttgtcgccaaggtaggaagctactttttcaccaaaaccgccgtccaaaatattgtcttcaatagtaacaataactttgttttcttgagtcaatttgtctaaagcggcagtgtctaaaatattagcagaaactggatttactaagctagcacctgtcttttcagccacctttttacctagcatatcgtacatatcacctaacgctaaaacagcaacatctttacctggtttaatgtcgtacttgatttctgaatagtcaacagcagtaatttctttaccttcaggaacatctttggtaggcatcttaattgctacaggatgcttcttttacttaatagcccattccatcattgccttttcttcggctaagttagttggagcaaggtagatccagttaggcaagttagaaatcattacttgatcaaacacacctaggtgagtcttacttgtgccagaaatgccaccaccagcaaccatcattacaactggtaaatcattagcggcaacatcgtgtgataattgatcaaatgcacgttgcaagaaggttgaattttcaaataaaactggagttgcaccttccttagccattccggcagcgaaggcaacggattcttgttcagcaattcctacatcatggtagttttcaggatatttgtttttaattctgtctaagccgaaaacgccgggaattgcggcattgatagccatgatcttctcaccattattgatgtgatcttcaagaacatcgagtgcaatagagctagcggtcggaccttcaggcattgctactgtcgtcttgtcagtctttaaatcgaatggcattacccagtggtgtgcttcttcgttgtcgattgcaggttgataacctttgcccttgagagtgttgatatgaagcaaaatagggtgatcaacatttttaactgctttaaaagcatcgatcattgattggatatcattaccatctgcgacataacggtaatcaaagcctattgcagtaaatggattttctttggtttcaccattagaatcacgtagtttctttaaagcagtaactaagccaccgacgttatcatcaattgacatttgattgtcgtttaccactacaactaagttatgcttttcaattgcagcgttgtttagcccttcataagcaaggccaccggtcattgaaccatcaccaattaaggccatgatgttttcatgtttgcccattaaatcgcgtgctttagccatcccagttgctaaggcaattgaggtagatgtgtgaccgacggcgtaatagtcatatgggctttcatcagggttgctatatggagttacatcttcatagtggtctggatcaagccaagcgagtgcacgtccagttaacattttgtgcgggtaagtttggtgggaaacatcccagacaatcttgtcctttggtgcatcaaaaacatagtgataagcaattgtagcttcaacgattcctaagtcgggacctaggtgaccaccttcagcggcatctttttctaagattagagtcctaatttcactggctaacttttccatttctggaagagataatttttttaaatcagcaggaccagaaattttattcaatagatattcaggatgtttatttattattatgtcctttctaacaagtagttacacttattatagataagcaaaaatcaaaataaaaatatttagttgtaattgagctcgattacttttagtaatgtaaatcagattattgacgtaggaagggacaacagtataaaatactgagtaagtatgtgtttttataaaagtttggaagtgagattatggcagtgaaaaaagcagccttagcctgcagtgtttgtgggtcacgcaactactcaatcaccgcaagtaagaatcgcactcagcgacttgaacttcaaaagttttgcaaacattgcggtaagaaaacattgcataaggaaacgaggtaaataaagctaatgattaagttttttaagagtgttggtcatgaaatgaaattggttaaatggccatccgcaaagcaaaatagacgtgatacagcaactgttattactagttcaattttatttgcggcatatttaggtgcacttgactggctcttcacttggttgactcaaagattaatgtaattgctagcataattagaaattatcagcgattcatgctataatattgacagctaaaagaaaacctctgtgggaggtttttttgtttacctaaaatttaaggagaaaaatatggtcgaaacagcacaaaagaaatggtacgttttgcatacttattcaggctatgaagacaaggttaagtcagacttgttgtcacgtgcgcaaagcatggggatgcaagactacattttccgtgtaatggttccagaagaagaaaaagtagaaaccgttcgcggcaagaaacaagaaattgaagaaaagattttcccaggatatgttttagttgaaatggtaatgactgatgaaagttggttcatcgttagaaacacacctaatgtaactgggttcgttggctcacacggtggtggctctaagccatcaccacttcttgatgaagaagtaacgcgtttgcttaagaatcaaggtcaacctgctaagaaaccagtagttaactttgatattggcgaatcagtaactattactgaaggtgcatttaatggcatggtaggtaagattactgatattcaaccagataagtacaaattatacgtatcagttgacatgtttggtcgtgcgactactgctgaacttgattatgatcaagttaagaagcttgacgaaaacgaataatatttagaatttttagttgtaattgtacccaaacgatgttattctaatacggtacgtttattattgtgggaggagaaaaaaggaaaattctccattttaaccgcatcacggaatcaaggaggttttgaccgtggcaaagaaagttattaacgtagttaagttacaaatcccagctggcgctgctaccccagcacctccagttggtcctgcattgggtcaagctggtattaacattgttggttttactaaggacttcaatgctagaaccgctgaccaaaagggcatgattatccctgtagttattactgtatatgaagatcgttcattcgaattcattactaagactccaccagcaccaattcttttaaagcaagctgctaagatccaaaaggcttctggtgaacctaataccaagaaggttggtaaggtaaccaaggaccaagttaaggaaattgccgagactaagatgaaagaccttaacgctgctgatattgaagctgctatgcgcatggttgaaggtaccgctagaagtatgggtatcgaagtcgaagactaatcctgttatttaggtaacaaattaggtgggagagttaagagaagctcgtttgaccacatatacaaggaggaaatcacatgccaaagcatggtaagaaatatttagatgctgccaagaaggtagactcaaataaattatactcagtagcagaagctatgaaacttgttaaggaaacttcatacgcaaactttgatgctactgttgatgtagcttacaacttaagcgtagatcctaagcaagctgaccaacaaattcgtggttctatcgttttaccaaatggtaccggtaagacccaaaccgttgtagtatttgctgaaggcccacaagctgatcaagctaaggctgcaggtgctgactttgttggctcagatgacttggtagaaaagatccaaggcggctggttagactttgacgttgtagtagctactccaatgatgatggctaaggtaggtcgtttaggtcgtattcttggacctaagggcttaatgcctaaccctaagactggtactgttaccatggatatcgaaaaggctgttaagaatgttaaggctggtcaagttgaataccgtgttgaccgccaagcagctattcacactcctattggtaaggtatcattcactgaagaccaattagttgaaaactttgacgcattacgcgacgttatcttacgtgctcgtccagcttcagctaagggtcaatacattaagagtgttgctgtttcagcaacctttggcccagggatcaagcttgatccattaaacttggactaatttaaaatagactattaaaagcctcgctattgcgaggcttttttctattcattgacctattattttcgaacatggtatcataaattgaacttacaaatctatatattaaggataatgtcatgaaaaagcattctattggaaaactagtcattatgttggtgctaatgctagcttttgttacgggctgtgctaataatggttctaaaatcactattgttggttcaagtgcaatgcagcttttagcagaacaagcaggtaatgattatcgcttaagtcatcaagacagcaacattgtcgtgcagggtggaggatcaggtacaggattgagccaggttcaagctggtgcagtccagattggaacctctgatgtttttgccgaaacacaaaagggaattgatgccaagaaacttcgtgattataaaattgcagtagttggtattgttccaattgttaataagggtgtaggtgtgaaaaatgtttcgcaaaagcaattgaaacagatcttcactggtaaattaacgaattggaagcaactaggtggcaaaaatgaagccataactgtgatcaatcgttctaagggaagtggtactagatctgctttcgaagatataattttacaaggaacaaaaccagttaagtcgcaagaacaggactctaacggtgccgttaaaaagattgttaattcaacgcctggtacgattagttacttgtcctttccttatgctcatgataccaatattcaaaagttgagtattaatggggtaaagccaactaacaaaaatattactactaataagtggaatatttggtgttatgagcacatgtacactaagggtaagcccaacaaacaaactaaagcgtttattaattatatgttaggtgaaaaagtacaaaaagatcttgtacctaagattgggtacctcagtatcaatgaaatgaaagtaactcgtaatagcaagaatcaagttacacaaataggaaaatagttcatggataagaaggataaattaaaggaagttgttgatcaagcaattgctagtcaacacgttccacacgttaaattaaaaaagatgggtccgactagtgttgatattgataaattaaccaagccatctaaagagactcatcaagaatattggggcaagggtttaacttacttggcaattgttttgattattgtcttagttgtctcaattatcggctttgtcggctatcacggcttggctacttttgtcagcgatcatgttaatgtcattcactttttgacttcaactgattgggacccgggtgagggcaagaatcatgttggtgctgcggtaatgatcgttacttcgttcttagtaactcttttagcagcattggtagccaccccgtttgcaattgcaatagctctttatatgactgaatattcatctaaaaagggtgccaatttcttacagtcagtgactgaattattagttggaattccgtctgtagtttatggtttcttgggattaactatcatcgtgcctgtgattagaaaactatttggtggaacaggttttggtattttagcagctacgttggcgttgttcgttatggttttaccaacaatcacatcattaacggttgatagcttaaaggctgtaccaagtcattttagaaaagcttcaatggccttaggttctacgcattggcagactatttatcatgttgttttgcgagttgctacgcctagaattttgacggcggtaatcttcggaatggcaagggccttcggtgaagctttagccgtacaaatggttatcggtaatgccgtcttgatgccatacaatttggtcagtccatcagcaacattaactagccaattaactagtcaaatgggaaatacggtcatgggaactttgccaaacaatgcattatggtcattagcattattgcttttaattatgtctttggtatttaatttcctagttaagttaattggaaagaagggacaaaagtaatatggatgcaaaaaagaaagataaattagctacggcgattatctatattttggtaggaattgttgtattaattttggccggtatcctaggtgatatcttgattacaggtattccacatttgtcctggcgctttttgagttctgaagcctcatcataccaagctggtggtggggtacgtgatcaacttttcaattcaatttatttgttaattttgactactattatctccttaccaattgctttaggagcagcaatttatctagcagaatatgctaaagataattgggtgaccaatttgattagaactacaattcaaattcttagttcattaccatcaattgtagttggcttatttggttatttattgtttgtagttcaatttggctttggtttttcaattatttctggtgctttagctttgaccttttttaatttgccaattttaactagcaatattgaagaagcaatcaagggcgtcccacaagatcaacgtgaagcaggattggctttaggattatctaattggaaaactattcgcgggattgttttacccgctgctcttcccggaattttaactggaattattttgagtgcgggccgaatcttcggggaagctgccgctttgatctatacagcgggacaaagtggatcaacagtcaattatgcggactggaatccatttagtccaactagtccacttaatgtaatgcggccagccgaaacattggcggtccacatttggaaagtaaatactgaaggaattattcctgatgccacgattgtttcagcagctacttcagcgctcttggttattgtggtaatcgtatttaatttaggtgcacgttatttaggcaataaattgtaccgcaagttaactgcagctaagtaggtgaaataatgcaagatttaaaacctagctatattaaaacttttgcaaatgatgatttggaattatcaactgaagatttaagtgttctttatggcggtaaggtacaaaaattatttgatgccagtcttcaatttaaaaagaacacgattacagctttgatcggtgcttcgggttcaggtaaatcaacatttttacgttcattaaatcgaatgaatgatcgagtagcaactgttaacggaaaaatctggtttcatggtttagatgtgaataagcctaatatcaatgtttatgaattaagaaaaaacattggcatggtttttcagcggcctaatccatttcctaaatcaattagagaaaatattgtttatgctttgaaggcagatggacataaggatcgggcagaacttgatcgagttgtagaagaaagtttgcgtgcggctgctttatgggatgaagttaaagataagctggataaaagtgcattagcattgtcgggtggtcaacaacagcgtttatgcattgctcgtgctttagctgttaagccagaaattttactactggacgaacctgccagcgctttggatcctgtttctacttctaaactggaagatacccttaagcagttgaggagtaagtatactatgattatggtaactcacaacatgcagcaagcctcaagaattagtgattatactgcattcttccatttaggacatgcaattgaatataattcaacggcagagatctttactaatcctaagggtaagattactgaaaactatattcagggaagttttggataaaatgacaacaataatttcagcaaaagatgtacatctaagttatggcaattatgaagcactgcacgggatcagtcttgattttaagaaaaaagaattaacagctttgatcggtccaagtggttgtggtaaatctacttttttacgctgtcttaatcgaatgaacgatgacatcgaaaacattaatatcacaggtgaaatcaagtttgaaggccaagatatctataattctaaaatggatttggtcagtctacgtaaagaagtcggcatggtttttcaacagccaaccccattcccgttttccgtatatgacaatgtggcttatggcttaaaaattgctggtgttaaagacaaagagctaattgatcagcgggtagaagagagtcttaagcaagctgctatttggaaagaaacaaaggacaatttaactagaaacgctcaagcattttcaggaggacagcagcaaagaatttgtattgctcgtgcgttggctgttagacctaaagttgttttattagatgagcccacaagtgcgcttgacccaatttcaagtagtgagattgaagagacactgatggaactaaagcatcagtatacttttattatggtgactcacaatttgcagcaagcaggacgaatttctgatcagaccgcctttttgatgaatggcgatttgattgaagctggtccaactgaagaaatgtttattgcacctaagaaacaaatcacaagtgattatcttaacggtcgttttggttaaaattttgaggtaaaaagatgcacgaaatatttttggatgaactgaaaaaattaaatacacaatttatggaaatgggtgtcctcgtcaacgatgatattgaccatgctacccgtgcttttgttgatcatgataaaaagactgcgcagtcaatggttgatgatgaagaaaagattcctacagaatcaattaatattcaaaagcaagccttaaaattaatggccttgcagcaaccggtagctactgattttagagttgttatcagtattttaaaggccactactgacttggagcgaattggtgaaaatgctatgagtattgctctggaaacaatcagagtaaaaggtaatcctcgtattccagaagttgaagaaattatttctaatatgacacataatgtgcgacatatgttaattcaagttttaactgcttacgtgcaagatgatgaaaaaatggcacgtgaagtggctagtcgtgatagcatgattgaccacgactatgtaagagctcgtcaattgatcgttgatggaattgaagatgatccttcgcgtgcaatggcttcatcaagctattttgtagttacccgtttacttgaacgaatcggtgaccacattgttaacttggctagctgggtggtttataaaactacgggtgaactagaagaactatctaattcaactgaaagtgaaacgatttaaataaagtaccgtaaaaagcggtgctttttttgtaataaaaaacagttgatacgcgtggtgctagttaaatcgttctagacaatatgccatattataagctaaaatagctatttctagccgctgttgaaagcctactggacttcttgctcgattattctcagcgttgtaataactaagcaaagaaaagtcgctttcaatgctttttctaattgccatcatcgcttactattgcgtggaccttgaagccataataatagactttcttggttgctttataaccaatatcagctacgccccgaaagatcttgacacgataattgcaaacaggctggcaaactggcactgggaaactatcaataatcaaaaattctccagctgtctttacttcttgattccaagcctgacggatacaacgaattagaggcaagagcattcgagctcgacggttaaaacgagaatgagataagccaacgaagaatttacagaatcttcgttgagattcaattccaatttcagtttgccaaatgagcatcgctaagatagaactatcaggaagcttggtctgatcaacatttttacgatgtttaagtccatcaggcgcataaagcttatatagcgagcgacaaatcacatttaaccgattaaaactaacttgtaaatggtgagaaaaacgcttaagcttgagatagttcaattagatcagactcttttctatttaaattacctacaacttttattaactaaaacgatttaactagcaccacgcgtataattaatgaatatttcaaaaactgtattggcgttataccaaacaattattggtgaaaaacagaaacgcttaatcaagacagtagatgcttatttggacattaactacggtgataaagtttatcagataattgatcaagttaaggaacgtaatattccaattttgtcttttggggatatagcagatcaaaacaatacttactcaaactacactgtttttggcaatgatcaagttgacgagatggtggataaaattaatgaaatcatcaataaccaaaataaataaaattatcttttgcattttacagcaaagcttgctataataattaactgtaaattctacctaagactcgggtggcatgacgcctcaaaatcccgccgaggccagaagatgatgaagatttttatgctccatgtctttcggcatggagtttttgcttttttaaggccttatagaatttatcaatgtgatcatggaggtgaaataatttgagtaaagctgctattgctgaaaaagaaaagttcgttgatgcatttgctgaagaacttaaagctgctaaggcaatcttggtaattaactaccttggtttgactgttgaagaagttactaacatgcgtaaggaacttcgtgataacgatgttaagatgaaggttatcaagaacacctacttaagacgtgctgctgctaaggctggtatcgaaggtcttgatgatacttttgttggaccaactgctgttatctacactgataacgctgatgacgttactgaacctgcacgtatcgtttctaagtacgaagatgactttgacgttatcgaaattaagggtggtatgcttgaaggtaagttgacttctaaggatgaaatcaaggaacttgctgctatcccaggccgcgaaggtttgctttcaatgcttgtttctgtattacaagctcctgtacgcgactttgcatatgctgttaaggctgttgctgaatctaaggatgaagactcagctgaataataaagaaatttatatttaatatctaaattctaatttttcggaggatacttaaatggctttagatactgataagattattgaagaattgaagggtgctaccatccttgaattgaacgaccttgtaaaggctattgaagacgaatttgacgttactgctgctgctccagttgctgctgcaggtgctgcagacgcaggtgctgctaagtcagaattcgacgttgaattgactgaagcaggtcaagaaaaggttaaggttattaaggcagttcgtgacattactggtcttggccttaaggactcaaaggaccttgttgatggtgctcctaagaacgttaaggaaggcgtttcagaagacgaagctaacgacatcaaggctaagcttgaagaagttggtgctactgtaacccttaaatagttacagcccaactgggcaactatgaataagctctttgctatgtgcgaagagcttatttttttgtataattaaatttatgatgaaagatatagaaagaagactaacgccatatcaatgggtaatggccattttagctattatttcgatttttttgattattttagattttgctgcggttattaatattgatgaaccgactagtaaatggttctggatcaatagtgcaattgtagtatattttgcaattgattatttttgtggcttacatgcagcagaagacaagaaactatatttcaaaactcacatttatgacttgctgagtattattccaatggggttattgtttatcagcttaaatatttttaatttatctgggctggtatcagatttgcggcttttgcgtttgattcgattagctggtttgatgggaaaattacgtaatatttttcatactaatggcctactctatgtaatcttttttacaattacatttttgttggtaggagcggaagcattcgcaatcactgaacatgtaacgctggatactgctttttggtgggtcatttcaacagcttctactgtcggttatgatgcaatttttggcaaaacaattccaccgcatagtattgtaggaaaattcgttacattagtaatgatgcttttaggaattggaatagttggtatgttaacgtcatcgattacttcgtatttgatgaggagaacgaatggcgcgaatacgttaaaaacgcatgataatattcaattaattttgaaaaagcttgataatttagaaaagcaaaacaaggatttggctgatcaaaacaaaaagatgcaagcacagattaatgaattgaaagatgtacagaatacaacggagctgcataagataaaagaatggtttgagaaaaagaaaggttagttaaaatgagtgaagaaaaaaatcaaatgtattttgcgactgatcctactgccaagcatgatcaacatgttgttgattatcatgtggataatattgatttgaaattcacaacagacgcaggtgtcttttctaaaatgagggttgattatggctcaggcgtattgatcaaggcaatgaaagatgttgtttttcctaaggataatatcttggatgttggtaccggttatggtccgattggtttatttgcggctaagttttggcctgatcaaactgtagatatggttgatgtaaatgagcgtggattaagcttggcaaagcagaatgcacaagttaatcacatagataatgtaaatatctattcctctgattgttatgaacatgtggataatgataaaaagtttggtctaatattaacaaatccgcctattagagcaggaaaaaaagtggttaatgagattttactgggagcaaatgagcatttggttaatggcggtatcttattagtagttattcagaaaaagcagggagaacctagtgcgcgtaagctgatgaccaatacatatggtaattgtgaaattttaacaagagataaaggctattatatcttaaaatcaactaagaaataactaaataaaaaatgcttgaaagtactattaaataagcattagactttataaaagtgctttcaaaactggatttatcctcgtataataatcttgtaaatatcaagagtatgtgaagaggataattattatgaaaaaggcttggaaatacattgttgcagtattgattgtaattgttggtgtgtttatgttaggtatgatttccggtgataacgagactgctgctccagctggaattgctgcattatacttgatcttgtcaggaatctttttctaccacaactttagaaatcgtaacattgaaccattgtaaaaagtaagcagctagtcgcaaatcaatgtcattaagttaagacattgacattatatcgacagcttttaaagatcgaatcattttgattcggtcttttttctttttaaaataaaaagtgagcagagtttatttgcctttctgctcactttcgtcatattatctggtctttcatagaaagctgtgcctcttatgaaatcccttcactcaaatattttaaagctgatggatagtattatcaataaaatcgctgacaacattcacgatttctctgtatctgatcaagcttttactcgctgtcgtaagctcaattccactgatttgattaagttaattcttaacatgggagctggcagcctgaattcggaaatttttcatgcttttcctgacataaattctagaatgactgcttcggcttttgaacaacaaaaggctaaattaaagcctgaatgctttaaagaaattatgttagaacttagccgggcaaataatgtactgcaattattagataatcaatacttagttgttgcgattgatggctctgattttgatcaaccttttaatcccgaatcagaaaatatttttcgaggtaaagatggtcgaatatactgtcaacttcatgtaaatgctctttatgatgtcttgaataaattatatttacttaaacttcccacactaaataagccagtaatctcttgatcttgcttggctttaggcttctatattatttttgctagttttctttaacaatttttgcatgtatttgggtaaacgattgataaagtcagccgtgaattcagctatttgtgcttcactggcatgaaagacttgctttacgctggccagcattgcatcagtaatcaattgcaaggaatggctaaaagtaatgtccgccagctcatcaatcatgcaatagaacagctcgcctagcgtgcgttcatcttcatcgtcccgcttggcaactgacataagcatgtagcgagtaaaaactatggcaacatgagcggtcaaagcatcgtaagacaggccatgatattccgtacttagttttagataacttttgcaagttttgaaaaaaacctcaatatcccaacgcttgccgtagttgcggataatttcatcttcgctaagcgacatgtcggtacaaatgattgccagccaatccttgcgattggcacggtttctaacgcagacaatccgtgcatctattttagcaccgtctttgtcctggcgtccgactttgactgggattgacagcaggtagcgagaacggccgcatcgctttttacagctgcgataaatctgtttgatgtttttgcgttctccctcaaattcatatttgattttggagctaaccttaaccatggcaatcacatccagcttcctttgcttgagctggacgatttgatgtggatttgagaaccagctgtcaaacagcacgtacttggcttgatgacctgctttcatagcttggtcgattaaattaaccatcacgtctgtgcctttagtccgggcaagcatacgtctttggccagcaatggtgcgctgatcaaaaactttattttcgccaatcatattctgtagcttctgagaagacagcagcactgaattgattggcatgaaagaagctccatcagtccagcccagggtcatcatgcgaaaacctttcttgtaagtcattgatacatggtcaaaaactttggcgactaattctgttttcttgaagccggtcctagagaagtaggaatcatcgacaacaaagcaatcagcccgtttttctgaagtcaaagatcgcaagtggttattaatgatttgcgcagacagacgtgtggtgaagtggagccaattgacgtgaacgttgcgcataaaacggtaatatgagttcttggaaaaattttcttgaaaatgatccattttcagctgcatatataagctgcggtcacgaaagacattgcttaaaacgtaaagaaacaagctgaacaggctaatgcctttttccttgcggaagccacattttctcaacagcttgatcacctgaaacttcttgatgaagctgatgattgagtttgaaaatagttgttcattttgttggtcaggagatggtaaaatagacattggcacaagcctttcatgcaaataaattatgttttggtcaatataattatagcaatgaaaaggacttgtgccttttatatttgtcaaaacacgcagaatcacaatgaaacaagcaattttgcgtgtgggaagtttaagtatttagacatggttatccaacccagacaaaaaatggatgaacgtgaggcagccttaactatgttaaagaaattagcccaacaagaaaaagatttcttagtcctgatggatcgtggctatattagctttaatttaattgaaaattgcaatcgattaaaacattgccactatgttatgcgatcaaaatccggagatggtgcttttaaagaaattgtagctatgtcgaatcatgaatacgatattgacttatcatgcagagtaacttcgtcacattattattatgtcacccataaagatacagaaaagtttcttcacctgattcttcacaaaaagcatcactataaagctgttcgttcaaaaaataccagagatcaacgctgggattttgaggatatgtgtgatgttagatttagagtttgtaagtttagaatcaatccaccaggttcagacgatgagtgggaagtcctcatcaccaatttatatcgaaatgaatatcctctagctagaatgaaagagatctatcatcttcgctggggaatagaaacttcttttagggagcttaaatatgacttaagcggcatacagtttcattctaaaaaagatcaatttgtttatatggaaatatacgcccattttgcaatgtataatgccgtgagtttatcaataattgcgagctcaaaaccgtatactcagggaaaatatcaatatcaaatagattttaaaatggcctgttgtatctggcgacgatattttagtataagtgataattcagataaaaacttcacacaattactgctggatgtggcattttatttaacgcctattcgaccaggaagaaaagataaacgaaatctaaaagttaaattagtagttggctttccttatcgtctagcagcttgaactaatttaaacgactatcttaagatggcttatttgtgctatcaaaaaagacatttatcgaataaaataattcgataaatgtctcaaaaagtgtcatcagattagtcaatgtcttaacttaatgacattggtcgcaaatagctgcttttttgatacaataaataaaaacgatgaattgagaagtgataaaatgctgtctagcgaagataaaaggaaatacatgcaattagccattgaccaggcaaaagaagctgaaaagcaaggagaggtgccgataggggcagttgttgttgatcctgatggccgcgtagttggtactggatataacaggcgtgaacttgatgaagatgctacccaacatgcagaaatgattgcgattaaagaagcttgcagtaagttaggcatgtggcgcttaattgcctgcagcttattcgtgactttggaaccatgcccgatgtgtgcaggggcaattattaattctagaataaaagacgtttatttcggtgcacttgatccaaaagccggagcttgtggatcagttgtggatttatttagcgtagaaaaatttaatcatcatccgcatgcaattcgtggactgtatcgtgatcaatgtgcacaaatgctaaaagattttttcagagcgattcgtgagaaacaaaaagcagctaaattagctcaaaaagaagtataaaatcagtaatttttaaaacaagatgctggtaatatttactgaaatacgttaacatagttgttgggcaatgtttgacctctgaattgtgtcaggaccggaaggtagcagcactaaggttgttcaggcatgtgccttttttgttagaatattaacagctcttagctcttcgagagctaggagcttttttacttaggaaagagaatttatggcttatcaagcgctatatcgtaagtggcggccgcggacttttgacagtgtgattggtcaagaagcgattaccgataccttaaaaaatgcgattaaacgtggtaaggtttcccatgcgtttcttttcgcaggaccccgcggaactggtaaaacatcttgtgctaagatttttgctaaggcattgaattgtactaatttgcaagatggcgaaccatgcaatgagtgtgctaactgtattgcagctgatcaaggttcaatgccagatatcatggaaattgatgccgcttcaaataatggggttgatgaaattcgtgaaattcgcgataaggtaaaatatgctccaacggaaggtaaatacaaggtatatatcatcgacgaagttcatatgttgtcgatgggagcttttaatgctttgctgaagacattagaagagccaccagagcatgtagtatttattttagcaacgactgaattgcaaaaagtgcctgcgacaattatttctagaacgcagcgctataattttaagcgaatttccaaagaagaccttgagaagagaatgaaatacattcttgatcaagaaaatattaaatatgaagataaagctttagcagtcattgctcaagtagccgatggtgggatgcgggatgctcttagcattttggatcaactgttgagttacgagaaggaaagcgtcaactatgatgatgctttgcagattacaggctttgcagatcgagaaaatattgaaaaaattcttttagctttgttaaatcaggatgcaggtcaagccttgcagtttacacaagatgagttggctaaaggagctagttcaaaaaacattttagatgaaatcatcgatctaactactaagagtttattaatcgtcaaaaccgatgaaaataaacaggaaacttttttaacaaaagactttattgaaaaaataaagagcgtttctacagatagttattatcgattgattaatttggctaataatgccttgaatgatttacgctatactaatcagcaacagataccactggaagtgttcttagtagaagcaagtagtactgcaccagtgcagataagcgctgccccagctaagacaacaccagctcaacctgcacaaggtaatactgatttgcaggctgaactagcagcgctgaagaagcaagtcgttgatttaacacaaaaacttagtgaagtatccaataagccaagtttatcaacaaatcaggtatttcacttggatactgcggtacctaaagtggctcctaagcctgctgttaaaccaaaagagaagcaaactaaaaagccggttagaaaagtcaaaaaaactacggcagaaaatcgcaaacaagtatatcatgttcttgaaaatgctactcgaaacgatttagagacaattaagaatgtctggcctgatttacaatctgttttagctgtctctgaaaaagcactgcttgatgtattagaaccagtggctgctagtcctgaacaagttgtcatgaaatgcaaatatactttatggtttgaaaatgcgagcgcagataatgatctgttagggcgcttaacggactatattgaaaagtttgctaaacattcttacggcattgttttggtgccagataacgattggctggcagttagaaaagaatttgttgaaagccataaggatgagctacttgctaagaaaaagcaacagattgagattcaagaagaaaagtcagatgaaccagaagttgatccagaagtgattaataaggcaaaggatctttttggggatgcagtcaatattaaagactaaagtactatgagcaatgattataatattaaagttttaaataaagaaacaacattacagatcttactagaagatcataattctttgattcgttttggagatggagaattagatttaattagaggagcaagtattccgtatcaagattatcaaccggaattagctggttcgctaaaagagctcctgttagaaggcagcaatcgccgtttattagtaggattatctgatgtttttgaaaagttagatcgctataatgattattgccgtaatttttatcaaaatagtttcttcccgaataatcatgacttgttaagagaagttgaattgcaatacaatgtatacgtttctactttcttttcacggccatatattgatttagtagataaaagtcacgctaaagattattttgctaaaatgaaacagctttggcaggatcatgatcttttaattgtagaaggtaaatatagtcgctcaggcgaaggcatgacttgttttctaatgctagatcaattagtagactcatttgtccgccaactaatgcatatagtcgcaaaaaagttattgaagatgaaattattaaaaatgcagctaataggttgattttactgatgttaggtcctactgcaaaagtgattgtggctgatttgatagctcagcttaataatcaaatgattgatatagggcacatcgattcagaatatgaatggatgaaaatgggcgtaactaataaggtgaagataccgcataagcatactgctgagtttaattttgatgataaacaagttaaactagagaaagacgacaattttgataagcagattattagtataatagaataataaaggagaaaaattatgagtagaagacctaattttggtggtatgggcatgggcggcatgaacatgcaacaaatgatgaagcaagctaagaagttgcaagcacaaatggcagaagagcaggaaaacattactgctcaagaatttactggtaagtctgccgatgatttagtagtagctacctttactggtgaccgcaagttgaaggacatcaagattgataaggaagcaattgatccagacgacccagatatgttacaagatttggtaattgatgcggttaacaagggcttggccaaaattgatgaggcaactcaggcaagcttaggtaaatacacgaaaggtttgatgtaattgcaatatccattaccaattgctcatttaattgatgcttatatgaagctacctggaatcggtgaaaaaacggcgactcggttggctttttatacgatggatatgcctgatcaggatgtcgatgattttgctaagtctttagttcaagtaaaaaaagacattcatcaatgtccgatctgtggcaatattaccgaaaaagatgtctgtgatatttgctctaatcctaatcgcgatcaaacaactattatggtagttgaacaaccaaaggatttgatggcttttgaggaaatgggcgaatatgacggactttatcacgtgcttcatggtgttctttcaccaatggatggaattggaccagaagagatcaatatcaagtctttaattacgcgtttgcaaaaaaatgatgctgttaaagaagtgattttggcgcttaattcaactccagaaggcgaatcaactgcgatgtatatcagcaaattaattaagtcagctggtattaaggtaaccagattggccgctggtttgtcagttggtagtgacattgaatatgctaattccattactttaaagcgcgcagtgcaaggaagaacggcattataatggctaataaaaagcaagcaaagatcaaagcaatgggtgatcaaaagttggtagccgagattgaaaagctacaaaatcaaattgcattagagcaagatctcgatcaaacaactttagatttatccgaagataattatgtgcaaaatcgaatcttaaaggcaaagtatacttttttgtataatgaagctcgtcatcgaggcacaagatttagtggtattactaatgctattacccagtagaaaaagaccgaatattggtctttttttattttgaataaataaaaaatagtaggactgttaatctctatgaaacttatgtagaatagacatatggaggattttatgagaggttattttgttagttttgaaggccctgatggcgccgggaaaagtacagttttaaaagaagtattgaaccaaattggttcagagcttgagacacaatatcttgtgacgcgtgaaccaggcggttcaaaaattgcagaaaaaattcgcgacattattttagatcctgctaacgacaagatggacaataagaccgaagcgcttttatatgctgcatcacgtagtcagcatgtggaagagattattcgtccagctttaaaggaaggcaaagtcgtattttcagatcgctatgtcgatagttctttagcttatcaaggagcgggacgtgatttaggaattcaggaagttaagcaaattaatgattttgcaacggataaattagatcctgatcttacttttttcttagatcttgctcctgaagtagggttgaaacgaattgaaaagctgcgtccgggtcaggaagatcgtttggaacaagagaatcttgcctttcataaaaaggtttatgccggttttctcaaggtaaaagaaatgtatcctgaacgtttcgtaactgttgatgctacgcagccaattgatcaggtagttgctcaagttattgcaatattaaagcaaagaatgccagagttattttaaggattgatttagatgaagttagtaattgcaattgtgcaaaaagaagactctaatgatttacaacgggcctttgttcaaaatgattttcgtgctactaagttagcaacttcaggtggttttttaagtcaagggaataccacctttttagtaggttgtgatgacgacaaggtagacgatgtattaaagattattaaggaacagtcccgagcaagagaagaaattgcaacaccacatatggtttcaactgggtatgaaattacacagcctttgaaagtgacagtcggtggtgcaacttattttgttgttccagttgatgagtttaaacgcttctgatgattgatcttagtaatgttgggaaaaagcaaacccaatttttaaaaatagcatatgaccaaaaaaagttagctcatagttatctttttgttgatagcgatgaggcacgggcattgaatactgcatactggctagcttgtttgtttaattgtactggtgaaaataagccggatggcagctgtcaaaattgtcggcaaattttgtcaggtaaccacccagatgtattgctagtagcgcctgatggaaaacagactctagggattgatcaaattcgtcccttaaaagaagaattagccaaaagcccagttgaaagtactcgccgtttcttctttattaatgaagcacaaaagttaactttagctgcagcaaacggtttattaaacttactagaagaaccagtagcgccagtagttacgattttgattactaataatagcgatcaaattttaccgacggtgcgttcacggacccagatcattaattttgacaatggtgagagggctagtggtaggactgcagtcttactggagaatggtttttcaaaagcagagattgaggaactgggtaatcttgataaatggaatcaggcaattaaatatttttatcaagaaatgctggaacacaacagcttagcacttgtcagtgcacacaagctagctgctgatgctaagctagtgtcagagcagcgttacatcttgcttcagttaaaattattggccgagcaagatttgcgtaatcctgctaaaagaataatggcggcgacaatgcttaagaatttaattgaaatagacaaaatgcgcttgagtaacgtaaatttacaaaatgcgttagattatctcgccttaaaatggaagtaggtgtttagattggatccatattcaaaactgaaaaagattgaagaaacaacagaaaatatgaccaagacgattgccagcttggaaaatgatattttagaaacattaaaagaaaacacggagttgaaggtagaaaaccaattactccatgagaagctggacaagttaacggcaaatcagcctgcacctgagactaaaacgcagagtggcttggaatcattaaagaagatttatgattcagggtaccacatttgcaatatgtactatggctcgcatcgtgatccaagtgcagattgtatgttttgtcttgatattttggacaattttggcgaaaaaaagggcaagaaaaaggacggtagataatgaaacgtcaaagcagttatgcaaaagatgaaggaaagctttatttagtgccaactccgattggtaacttggaagatattactattcgcgctaaaaaagttttaaccgatgcagattatgtagccgcagaagatacaagaactagtgggattttactggaaaaaattggggttcataataaaatgatctcttttcataagtataattccaaggagcgggcgccggaattgatcaagttgatgaaggaaggtgctgtgattgccgagattagtgacgcggggatgcccgtgatttctgacccaggttatgtattagtacaagaatgcattaagcatgatattccggttgtaccacttcctggtccaaatgctttttcaactgctttgattgcttccggttttaatcagccatttacttattatggctttttaccaagaaaatcatcggaacagaagacctattttgcacagatgcgcgataatagagcaacatcaattttttatgaagccccgcatcgtctagcaaaaaacctcaaaacattggctagtgtgctgccaaaagatcgtcaaattgtagctgcacgtgaactgaccaaaatccacgaagagtttatccggggtagtgtggaagaagttacgaattacttcaatgagaatgctccacgcggggaatttgtgattctagtttcacctaatacagaagcgcctaagcaactatcttggacagaattaattgacttagttaatgacttggttgaaaaaggtgaatccaagaaagatgcaattaaacaggtagccaagcagcatcatgtttctaagaatgaattgtatgatcaatatcaccaggactaattatgaaatataccgaagaatatcaaattgaatttaaagattgtgatgaaaatcgccgattaaagttaccagcactagttgatttgatgatgcaggtttctgagcatcaattaagtcaaggtggtgctgggactgatgacttggttaagcgtggtctaggctgggtcgttactcaatatcattttgagattaaagacctgcctaaaccgggtgatcaagttattctaagtactgaagctagcggctataatcgtttttttgagtatcgtgattttggcgttagtacgcaagacggtaagccattagtgactgtaaaaagccagtgggtaatgctcgacttgaagaagcggcatatggtgccagccgatactaaaatgatggaagattggggtgcaccactacttaaaaagatgccacgttttccaagattgcgtccgcaaaccgaatacgagcaaaagcgttcataccgtgcgcgttacgatgacttagataataatcatcatgtaactaatagtcattatttcagttggtttgttgatatgttggatcgtaactttttaaaagaacatattgttacagcaattgatattaaatttgataaagaagttcattatggtgagagtataaattcttgcatggacttggttcaatatgatattattattacatctcatgcaattgaagcagaagatgggacagttaaggccgtctgtgaattaagttggcgtgagatatagtaacaacatgacgctattagtcgtttttaattagggaggaatcggtcgaatgaatacaaagaaaattttacgaacggatttacagcaactagtctttttaggtattgttgttgcaatgaaaattattctaagtcagttttcttttggtccagtaatggttaaagtgggactgggtttcattgggagtgtgctattaggatatctctttggtccgctctggggaacaattggcggtggaattagtgatttaatttcatctgcactttttggcgatcaaggtggctttttcattggttttactttaacagcaatggcaggcccatttatctacgccctgtttttatataataagccagttaaaatttggcggattattgcttctactattctggtgactgtaattgtcaatattggcatgaataccttatggctacatattatgtatggtatcaatttcaatgcggctttgatccaacgtttacctaaggagatgatcgttccttggattcaaatggttatcagctactttgttttacaagccgtttctcgtgttaaaataaaaaagtgatttaaagcgaaaagagaaaaatgtataaaatgaaaattttaagtgtttcgacagctactaatcatttgagcgtggccttgaatgatggtcaacaaattattgttgagaaaaatgaacgagatgagcgtaatcatagcgaacatcttgatcctttgattgatgaaatcttaaaagataatgatttaagcttaaaagatattgatcgttttgcagttgctattgggccaggttcttatactggactaagaattggaatcactactgttaagatgtttgccagcattttagataaagaggttgtaggaatctcaactttacaagctttggctaaaggcgttcaagaagacgctttggtaattactggtttagatgcaagaaatgacaattattttgcggccggttatttaagcggtgctgtaccagagaatgtcattccagacggtcattacaatatcgacgttttaattaaggcgattcaagattatgcggccaagcatgaagttaagaaaattgtttttgtgggctcaggtcttgaaaagcaagatgaaaaatttaaagctttgaatattccatatgtttatggaactgaagaagagaatgtcatccatgctgcgctaattggacaattagctgaaaatgcggttccagttgatccagataaattattgccacgttacttgcgtcgaactcaggctgaagtagactggcataaaaagacaggcaaaccattcgagccagatagtcattatgttgaagaagtttaatcaatttttccatcaacagttaaatcggattgatatgagttttaccccgtttattgcgaatgtaaacggtaagagactacaaattatgcaagctacagatgacaatattcctgacctgcctgtattagaggagcaagtttattcaggtcggacaccgtggaataagttttcatttgagcgagaactagagaagcggcataattgtctttatttggtagtgtattatgaatcgatgctagttgcatttattggtgcgcgttttactccagaagagacgcatattactaatattgcagtagcgccggcttttcaaaatatgcatattggtcgttacttaatgcaattgattattgatcgggcgcgtgaaaatgacagtgattgcgttagtctagaggtaagagtagataatgagattgcccaaaagctatatcgttccttaggttttgaaggtaccttcattcgtaaaaactattaccatgatacgcgtggtgctagttaaatcgttctagacaataagccaaattataagctaaaattgcaatttccaaccggctttgaaagcctatcagactacgtgctcgattgttctcggcattgtaataggtcagaagcgaaaagtcgctttcaattgttctgcgaatagccatcaattgatgatcattgtgctttttagctcctgtcatatttttacgatatggtgtccaaagttcgtaacccatttgttttagctgttgatgcagttctttgcctaaatagccttcgtcgccaagaagatagtaattagatggatgggtattttctatcagttcaactgtctccctggcatcatgaactgatgcctttgttacgacataatcaagaatgtaaccgtcatcgctaacaatggcatgaactttgaaaccatagaagtaaattttcttggtggccttataaccaatgttggcataaccgcgaaaaattttagcacgatagtttcgaattggttggcaaacaggtaccggaaagctgtcaatgatcaagaactgtccattcaggtcaacctttttattcatttcttgccgtatctgataaatcaattgcaatagctgacgtgaacgccgattaaaacgtgagtgtgataaacaattgaaacattcacagaatcttctttgtgattcaattcctgtcttagcttgccagataagtaaagccaaaatcagactgtccgtagttttaatttgatcaatatttcgccgatgagtaaactcagccggtgcatacaaacgataccagtgccgacaaattatcactaaatctttaaaactaacttgtaaatggtggctaaaacgcttaagcttaaggcagttcaatcagatcagactcttttctattattactatttacaagtcgagtctaacaagattggacttttttattaactaaaacgatttaactagcaccacgcgtaccatgatactcataccgatgctatgaacatggttttatggttaaaaccacatcagattaaaagaaagaagtttacgttttgagtgaaaaaaatgttcgcattttagcttatgagagttcttgtgatgaaacttccactgctgtcattaaaaatgggcgtgagattgaaagcttaatcgtagcaacgcagattaagagtcatcaacgctttggtggtgtagtccctgaagttgctagtcgtcatcatattgaagtggttagtcagattactaaagaagctttggctgaagctaattgtacttggaaagatatcgatgcaattgctgtgacttatggccctggcttagttggtgctcttttaattggtgtaagtgcagctaaggctgcttcaatggcaacgggtattcctttgattggtgttgatcatattatggggcacattatggcagctcaactaaaagatgagattgaatatccagctcttgcattacaggtttcaggtggacatactgaaatagttttacttaaggatcctgttcattttgaaattatcggtgatacgcgcgatgatgctgctggcgaagcatacgataagattggtcgtgttcttggggtaaactatccagcaggtaaaactatcgatgcctgggctcatgaaggcaaggatacctttaacttcccacgagcaatgatggaagatgatgactatgacttctcattctcaggtttaaagtcagcttttattaacacttgtcatcatgctgatcagattcatgaaaagttgaataagtatgatctggctgcaagttttcaagcagcagtaattgatgttttggctcataaaacaattcgcgcaattaagcaatataagcccaagacctttatcatgggtggtggggtagctgccaaccatggcttacgtgatcgcatgagtgcagaaattgctaagttgcctaaagcagaccaacctaaggtgattttgccagatattaagttgtgtggtgataatgctgcaatgattggggctgctgcgtataatctttataataatggtcaatttgcggatttgactttgaatgctgatccatcacttgaattgccatatgctaagagcatgttgaattaaatagaataactttttaaatcaaatacctagaacgattatttctaggtatttttttctactaaggcatggtccttaggatcttttaaatctaaggcgattgattccttgcctgcgttacagattctaaagtattcgctagaaccatctgcgatatatggccccatgtgacgcgtgtcatcgcctgtttttctttcgatatgaattacccgggcaccactatctgcgagcattctggtacaagtagggcctgagaggacgtgggtaaagtcaataacgagcatcccgcttaaaggataaggtttgtttttatctaaatgactgttttttgcttctagctcagcataattaggttctgtcatagttgtacgctttctattttaaaaagaaaaagctgttcgaagtgaacagctttttgatgagaataaattaattattcacccttgataacttcagtacgtggattcttaggaccttgagccttagaaattacgccttcttcagtcaatttttcgatttgatctggatcataaccaagtgaagctaaaatttccttgttgttttcaccaagatctggagcacgcttgtagttagaaagtgagaatggcaaaccaatagtcttgaacttaccacggttaccaccttggtcgatggttacgatagtaccatccttgttcaagtccgggccattttcaatttcgtgccagtcaagaactggacctacaggaatacaagcagcaccaagcttcttagttaattcatacttgtcgtattgcttagtgtagctttcaattaatgggtaaatttcttccttgtgtaattgacggttgtgccagccatcaaagcgaggattagtaatccattctgggtgacccatagtgttggcaattgctgcccagctcttgtcactgttttggataacgatgtaaacataagcgttaggattagtttcccaacctttagccttgtaagtccgaccgataacttggccaccttcagtgttctcagcacgaggaattgccttgccccatttccagttagggtaaacagcgtagtgaggaagggcacctaagttgtctaacatgatttggttacgcaacttgatacggcagaggttcaatacagcgtcttgcattgactggtaaacaaaagtaccttcactggtgtgttcacgttgaagaagggcagctaagataccaatagtaaggtgcatccctgggtttgagtcacctaaagtagcagctgattgagtaggaacgttggctttgccttcgttccaaccagtagcagaagcagcaccaccagcagattgagcaactggttcaaaggccttaacgttttcaaaacgtgaatcttcattgagcccttcaatgatgcatagatcaatcttgggttcaaagcgtgaagcttttcccaaccaaaaccgttacgatcagctgaacctggtgcaatgttttcaacaaagacatcagccttcttagccaagtcgtacataatctttttaccttcatcagtcttgatgttcaaagtcaaagacttcttgttggcgttcaattgcaagtagtaaagactccatgaatcttgaatatcaagtaattcatttctagtagggtccccagtgttagtacgttcaatcttaataacttcagcaccaagccatgctaaaagttgagtacatgatggaccttattgaacttgtgtccagtcaacgactttaataccttttaaaggtgcatattcattttcttcagtcgtgattaattgtccttatcttcaagttgtgctaaatctaattctgggtttaagttaccaatgtgaccagattccttacccattgattcaggaatttgagcatcaataattgaaggattacctgattcgtaggccttttcaagagcatccttcatttcagcgtagttacttacacggtagctgtcaccaccaaaggccttagcgatttcagcatagtgagcattgtggcttaaaacagtaggtcctaattggtctttaactgggttacggtcaccattgtagataccaccattgttaatgatgacaacggtaacaggtaagtggtaacggcagatagtttccacttccattccatcaaaaccaaaggctgagtcaccatgaagtgagatgactttcttaccagtttcaacagctgcagcaatggcataacctaagccgacacccattacgccccaagtaccagtatcaagacggtgacgaggtttttgcatgccgattaagttacgaccgatgtccaaagtgttggcaccttcacttacgatgtaagtatctggatgcttttgcattaagtcattgattggttcaatcgcactgtaaaagcctaaagttggcttagcttctgaggcagcaattcttttggcaaatttttcattgttagcttcacaagcattcttaattgaatctagccagtcttgaggggccttaacgtcagctttttcaagggctgcgtttagtttttgcaaaacagaggtaatgtcaccttgtaatggggcatcgatctttctgtttgagtcaaattcagtagcgtcaatatcgacttgaacaaacttagcatcttcattaaacaatggagcctcaccatttgaaagcatccaattaagccgagcaccgattaataagactacatcggcttgacctaaagtaaatgaacgagctgaagcagctgatgatggtgagtcatctggtacaacgcctttagccattgacatcggcaaaaatggaataccagtcttagtaactaattctctgacttctgcttcacttctagcataagctgagcccttacctaggataatagcagggtgtttagcgttttttaataattcaacagcacgttcaattgcgtcatctaatggcaattgctttggagctggatcaactacttcatagatatgagcgtctgacttttgtgcaactgtgtcggcaactgttgcagcaggaaggtcaaggtaaccaccaccaggccgaccgctcatagcagttctaacggcacgagcaactgctaagcccatgtcttcagcacggtcaacacgataagctgctttacataaaggtttagcaacattgtattgatcaagtccttcatagtctccacggtcgaggtcgatgatatgacgatctgatgaacctgagatcataatcattgggaagcaattcttagtggcttctgctaaagcagttaaaccatttaagaaaccaggagcagaaactgttaaggctacaccaggcttgtcggtaagaaaaccagcagcagcggctgcgtctacagctgcatcttctcttctaaattcataaaacttcataccctttaattcagctaaacgggcaaagtcagtaactggaatgccgacaacaccatacatgttgtttaaaccgtttgcttgtaaagcatcgattaaaagtgcagcaccagtaagtgatacattttgtgtcacgaaaaaaattctttcaaaaaatcaccaaatgcttatgtttatgcatttcaaaaccaagatacacctcttgaattgtatatacaggcataattgaataataaggtacgttattttaatatacgtatataaaaataagcaagtcctaatatattagaacttgcttattatacttttattcaaaattgtccatttcttcgattgccttttcccaggcagaatttgcttcatctaatttctgttgtacatcagaaagctgttcttgcagtggccccaatttatcaaagcttgaagcaatttctggattggccatttcggtttggatttcttgctctcgttcttcaagctgttcaatttgtttttctgcattatcaattgcacgctgcaactttctcttttgagaatcacgttgcttttgctcttggtaagaaagtttttgctggctaatttgtttgcttggctcgacttctggctcagcggcactattttcagccatagctgcttgttttgccttctcatcaagataataagaataattgccatcgtagactttagcatgcccatcgcgaactaaaacaatcttattagctagttgattgataaagtaacggtcgtgggaaacaaagagcagggtaccatcaaagtcttttaaagctttttctagtacttcttttgcttcgatatctaagtggttagttggttcatccatcagtaagaagttatcatgctcaagtgataaaacagttaaagttaaccgtgctttttgtccaccagataattgacctaccgttttatcaatgtctttagctgtgaataaaaaactggctaagattgaccgtacatcgcgttcaggcatggttttgtgacgatcccaaacagtatccaatacagtcttagatgaatctagtccttgtaattcttggtcgtaataaccaatctcaagggatgcgccatacttaattgagccactcttgggcgttaattgcttcataatagtcttaagcagggtagatttaccgattccatttggtccaatgatcgcgacgcgatctcctttattaatctggaaggaaatatctttaaccatggttttatcgggataaccaatcgtcaaatcgttgaaaattaatacttccttgccagaaggatgatcgcttgaaaaatgaatccgtaccttatttttatgtttaggtggagtaatccgctcaattttttctagttttttacgccgactttgtgcacgcttagtggtagttgctcgaaccaagtttttttggataaattcttcatcttttttgatttcagcttgttgcttttcataagcggcttcttggtccttatcacgttgctcgcgctgcatgacataggctgaatagttgcccttaaaagcagttaatttaccaaattctagttcaaaaatttgggctgctaaatgatctaagaaatattggtcgtgggaaaccacgaggattgcaccactgtaattctttaaaaatccttccaaccaatctagggtatctaaatctaagtagttagttggctcgtccaataacaacagagcaggtttgcgcaaaagcaacttaacaaaagctaaccgtgttttttcaccaccggataaactaccaatcttcttttgccaagtgtcttcaggaaacttaaagccattcaagatacttttaatatcagattgataagtataaccgcctttttgttcaaagttgaattgcttttgatcgtattgcttaagcaattcttgatcttcaggatgatctgcaattttttcttgtagttggactaagctttttctttcccttattaaaggagcgaaaacggtttccatttcatcccaaatggttttattttcatctaatgcattttcctgagcgatataaccaacatcaatgcctttattaactgtaaattcgccgtgagttggttcttgctcacctgtcattatttttaacagggtagtcttaccaaccccgttaggaccaactaagccgattctggcattggaatcgattgaaaaattaacatttttgaataatgtgttggccccaaattgttgttctaaatcgtgtccttgtgcaataatcataatttttcacctaaccactattctaccatatagcgcaaattgtttgtttttaagttaaatatgtgaaaaaatgatgatttgtgaaaaagatacttgcataagtactatcatagcaggtatgatagtagtgcttgattgtacattcacaaacatttaagtttggagggttcctatatggaaaaaataaaaatcccaaaagcaacggcaaaaagattaccattatattaccgttatttgattattttaaatgaagaaggcaaagataaggtttcttcaactgagctgtcagaggcagttcaagtagatagtgcttcaattagaagagacttttcatattttggtgcgttgggaaaacgtggctatggatatgatgtaaagaatttattgagcttcttcaagaaaattttgaatcaagatactttaactaatgttgctttaataggtgtaggtaatctgggacgggcgctgcttaattacaactttaagcgcagtaataatattcgaatttcctgtgcttttgatatcaataaggagattactggtcgtatcttaagtggtgtccctgtttatgacatggacgacttaaagcaacaactaagtgatcaacagattacaattgcaattttgacagttccttcaacagctgctcagaaaaccacagatgaaatggttgatgcgggtgtaaagggaattatgaactttactccgattcgtttatcagctccagctgatgtgcgagtacaaaatgtagacttagcaaccgaattgcaaacgttgatctatttcttagatagtgacaaagaaaactaaatttgagtaaaagaaacatactaacctagtgttggatcatgaatcgacggattcacgatctggcactttttattttgtctaaaatagaaagtgaagataaagcaaatcaagtcttcagctttttagacacttgatgtcgtaaaagaaacggactgctttaccacctattcttaagtctcttcgaagtctgtgggcacttagatgccgtgtttagaaaattagaattaataggttgataaagaggtttatcttcacagcggaggttatattatggaatcacaaattattttcggtattgatgttagcagtaaatcttccacagtttgtgtggttaatgaccggatcaaacaaggcgaatcttttagaatctctaatgattcctttggctatcaaaaactttatgagcaactgaaccaatatttgataactcctttagttgttttcgaagctactggtgtttattctctaagcctgcaagctttcttagaggattatcatattaagtatttgaagcttaatccgcttaaagcgaaaaagctaatggacaataatttacgccataataaaactgataaggtagatgcttatcgcctggctttaattcaatttaatgccccgcaaaagctgcgtgatccacagcccagagagtatcatgaacttcagaatgccagtcgctattatgaagaacttactaggagtatagttactactaaaaatcaattgcaccgcaacctccaatccactttcccacaaattgaagaaatactgtctcatccatctggcagaatttattgggcgcttgttagtcttttcccacatgctggatatgttctagaaaagaatgagacacaggtaactcaaatgcttaattctatttctggaataggacaacaaagggcacggtacttaaccacaagattatacgcttttgctagagaagcttatccttatgattccaaagatagtattatcgttagagctattcaaaggaacatttctaatttattttcactccagcaagaacgcgactatgtaattaactacatggaaaagctggctaaagcagtaaacgctcgtgctttatccatctatttgagtatcccaggggttgctagaattacagcagtgagattagtagcagagctcggtgatctaagacggtttagcacttcagctcaaattgatgcgtttgttggcattgatccaggaaggtaccaatctggtgaaaaagacagttctcttggcattaccaagcatggcaatcatattgccagaaaaatactttatcgagttattactcaaatggagacggtaaaggctacgcagccttgccatataactgattattatgacaagaaaaaacgatcttcaaatagacaaggctataagaaaatcgccattgcatcagtccataaactgatacgcacaatgtttgctcttatcaaacatgatcaattatatgattacaacatagccaccgaaaataaaagactttagctgaaatcaaataatcaacttaagtataagcaacctatggaaaaactacaagtattcataggcttatttgtggtactttcgctttttcttaaatttaaactcttatttgctttaaccttattcgcatcattaaaacaagtaaatttattttcttaaatcattgataatacttgactttgggtagaaaaaagccgattttcggctttttttcatgcagttgtttcacttttgattaatttgacaggcaaaatataattcttttggcgcaatttttcgtcgggattggaaattcgggtaagcaataacttaaccaataaagttgcaatatcatgaattggctgagcaattgtggatagttccgaatggtaagtttgaatttgctttgttccgtcaaaaccaatcacttttaattccttaggcactttaatgcctaatttttttgcttcttgtaaaactaacactgcagttaaatcatctgtgcagacgacgccatcaggctgatcattgactaacatatcatgaattttcatatttttaatgttggaagaatcagaaaaagcaactgaacgaatgtgggctgaaaagtgacattcctttgcttcatcaagataagctgctagtcgttcgtcagtcggattaccttttctgtgttcattgcccagaaagtaaattttgtgacaaccagcttgaaccaagtcatgtactgccaacttgatgccttgataattatcacaactaacaattggaacattatcagatagctttcggtcgaaagagacaattggcaaacctagttgttggtattcattgatacctagattgtgcgcaccagcgatgatgccatcaacttgattagcctgaagcatgcgcagatattcgcgttctttttctttgttttgtcctgcattgcataggattactttatagttttgttggaataaagtggtttcgatatcctgtactaattccgcaaaaaaaggattagtgatctcaggaaaaatcaaaccgactaatttcattttctttccttgtaatgagcgggcaatagaattgggacgataatttaattcccgcattgcggcaaaaactttatctttagttttttgacttaaatagccatggttgttgattactcgcgaaacggtagttacagagcaaccggcttttttggcaacgtcgcttaattttgctgccatagtatcacctgatgtttaaagaattgtttgcatttgccaaagcttgccagtgtagtcaatgtcttgagcaaacgcaatttttttgttggtctgatcggcaaagtagcgtccagtcaataccttttcaccatcattaacgaatacttcaattaatgaatgatcaacaaagatatcaagcttgaggtcatgatttggtgaaagcgtaatagctcgactttcgccataatcaactgctactttttgcccagcatgagcacgatctaatactaatttaccatttttggtatcgaaattgagctgtaaactgttacttaagtcattatttgcagctaaatgtaaagtgccactttggttagccttaattgttaattcaagttcaaattgttggccggcttgatcgctgactacttgattagatatgcttgcttcgtttttgcggatactgcttattgccttaactggcgtttgaattaacttgtcactctttaggtggagttccttcacttgactcaagcagttagcccagttttcatcatcagtagggtaagtagtgtcaggcaagccaacccaactgacttcgtaggcattaccatctggggcgttaaaggcctgagtggcataaacatcgaacccgtgatccaaattgtgtaatttacctggattaattaacttatgattttcccagtcaatatcatcagcaataacgtacatatttgggtaaatgtcatcataagctgctacttttttgtctaaaccctgaggacagaaaatgaccacgactttgccatcaacacggacgatgttgggacactcgatcatgtagcccatgtcttcgttggtaaagtctaagaagcccaattcttcccagttctttagatcctgagacttccaaacgtcaatgtgaccgtgtttttcctttttatcttgggcacctaaaattgcgtagtaagtgtcattttctttgataatttggggatcgcgaaaatgttcggtgatgtgatctggattcttaaataggatggttttgtctgaaactttattatttttatccatccaagcaccgatttgataaggagtacgtacccaattttcatcgcggtggttaccggtatacatgatgaaaagcttaccatcgatttcgcgagcagagccagaataagctccatgtgaatcagccattgtgtctggttcaatacctaagcctaagttttcccagtgaaccatgtcagttgatttgaagtgccaccatgactttagaccgtgaactgcgccgaatggatatgattgatagaagaggtggtaagcaccatcaaagtaggaaaatccattagggtcattaattaagccagaaataggatgcaaatgatagcgcatttggtaaggggagtttgcggcttgtgcttgcaaatgcattaatgtatcagcgtcccaatcttgataaggtaagtaacgtttttctcttgtccattccataaatatacctccatgaaagcgttgtctttttacatgtattttaagttagtatgaaaaatatgtcaaacgtttaacagaaaaaataattattaattcataagtaataaaataaataaagaattttatgtcaaacgattgacatattttttgaatgcgttatcataattagtgaattgagaataaaacgtttacataggagggatcaatatggaccacagaaaagtggctgaacgagtaattaaagacgtcggccgtgacaatattattgccggtgcccactgtgctactcgtctgcgtttagtattaaaagatgattcaaaagtcgaccaaaaagcattggataatgatccagatgttaagggtacttttaaaaccaatggtcaatatcaagtaattattgggccaggagatgttaatgacgtttacgatgagttcattaaaatcactggtttgaaagaattatcaaccgatgatttgaagaaggttgctgcagaaggtaaaaagaagaatccagtaatggatttcattaaacttttgtctgacatctttgttccaatcattccagccttagttgctggtggtttgttgatggctttgaacaacttcttgacttcaccaggtctgtttggaccaaagtcagttgttcagatggtaccgaatgttgctggtatttcaagtatgattcaagttatgtcagcagctccgtttatttttatgccaattctagtcggaatgtcggcagctaaacggttcggtgctaaccaattcttgggtgctacaatcggaatgattatgacgacacctggactccttggtgcaaatcacttctgggacatttttggcttgcatgttgcgcaaactaactatcaataccaggttattccagttttagtagctgtttgggtattgtcaattttggaaaagtacttccacaagcacttgccatcagctgttgactttacctttacgccacttctttcaattatgattactggctttttgacttttacaattattgggccagtcttcaaaggcgtatcagatggtattaccaatgctatcgtttggctatatgacactactggtgcctttgggatgggtgtctttggtcttacctattcagctattgttactactgggcttcatcaaagttttccagcggttgaaactcagcttttagcagcctttgctaagaatccagccagctctggtgactttatctttgttaccgcatgtatggctaacgtagctcaaggtgccgcaactttcgctgtttacttcttaactaagaacaagaagatgaagggcttggctagttcatcaggtgtttcagcacttcttggtattactgaaccagcacttttcggtgttaacttgaagtataaattcccattcttctgtgccttaattggttcaggtgtagctgctgcttttgcgggcttgatgcatgttactgcagccgctcttggttcagctggtttcttaggcttcctttcaatttatcctaagactattccaatgtgggttgtttccgtattaattagttttgctgttgccttcatccttacttatgtttatggtaagggtcatttgaaggaagaagttgctgaacaagatgttccagtaaacgacgcaactgattatgctgaagaaactcaaaaggctgaaaagcttggtaaggaacaaatggcattaaaggatgaagttattgcttcaccagttgatggtactcctgagagtttaactaaagttaatgatcaagtattctctgctaagttaatgggtgatggtgcagccgttattccaagtgatggtacgatctattcaccagttactggtactgtgactattgcttatgaaactaagcatgcttatggcattaagtcagacgatggtgcagaagtattgattcacattggtcttgatactgtaaaccttaagggcgagcacttcgaaagtttcgttaagcaaggtcaaagagttaacaagggcgataagcttggtacagttgaccttgatgctgtgaaaaaggcaggctatgatactactgtcatggtagtaattactaacactgccaactatgcaaatgtttcaagaattactgatgcgggtgacaagcacggcgacaagttgattgctgttactgcacacaattagtttcttctactcctctagaaaaaattaaaacaattagaataaaagacgctaagaaagattgtttcttggcgttttttagtactaagtgctgcacttcaattttaagtttgagtaaaatgttctctataaagaaaaacaaagtgagggtatgttttatgaagttaaaaagtggagttattggagtattagtaactggattaactgtctttagcattaatctaactagctctaaaataaaggcagcgataacagtgcctaatcctaagacagattatgtagttaaaactacttctaatgtgtataagagtaatggtaagaggaccagttttaagacacgtggtcagatacaaaccggtaatgttccagtaattgaatcacaactatatgaaggcaagttcattaatgtgcaaggaactaagacgattaatggtactgcttattataagatcggtcctaacgcatacattaaacaaaataatgttttaaattatgctcaagaaaaagcaaagcttgaggcatatcaggcacaagatgatgtgaatgatgattcagatcagtcaacagaattaagctctgatgatgtgaattttgacatagcttggtatgacaacattaatgaggatccatctccagcgatgttcgatgattcaggatatcataatagagtgattaagaatgctcgtaaattattaggctatttcacttatggaacaggtgcataccgaactaattttggcagttggcgtcatcctaataaaaacggttcaactgattgttcaggatttgtgtggatcgtaatgaagagagcaggatatcgtgtaggaaatgctccattttttactctgccaatggaacgagatgctaaaagtactcatggctatttgaagaaaatttctgccaagaatattcgcccaggtgatattgtgattgttaatactggcaatggtgttggtcaaaacggacatgcagcaattgttgatggcaaatatgatggttgggacacgcaaattattgaagagggcggcaacttaggtgtagatgatgtgcaccgctctagtttaggtagctcactgagcgataagctggccaaaggtcgaatcacttatgctcgccccgttaaatagtatgctctatgctataattttgctaatcaataaaggataataagaatgaaaaagaacagcacgcttaaacatgtctggattatgacggctgtctattgggtagtaggtattctaagtattttctggggtaagcttgatcatacttttgcgtctcaattaaaagagatcaataatatttacgtgttagttttaataattatcttaagcttgccgctacttttatcgctgttattgtcggttaaagtaaaaatgccacgtttgatctgcaatccactagttgctgtaatttatctattagtggtaattgcagcaggtgtagcatataacttacaaaatattattggctacttcttcccaatcatcctcttcattattatggcgctagttgctgttttctatgctttggttaagacttttagcagcagaaaaagtggtaaatatttttttattgatggtaaagataagaaagaatgccatgatttctgggatgcttataagaagtactatgtaatgggattaacttacggcattattgatggtttgattactgtaattagttaaaaaagttaagaaaaatcaaaattagcactcaattgaaaaaagtgctaattttttcttgctttttttcacaaaacagtttattatcatatttgtaagttagcacttagcaaataagagtgctaatgattaatacagtaataaaaaatataatgaagaaaattaaacataagggggactaaacgtgttacaaccaattggtgatcgcgtgatcgttaaagttaagaaagaagaagaagaaactgttggtggcatcgttttagcatcaaatgctaagaagaagccaactgaaggcgaagttgtagctgttggtgaaggtgcttacgcatcaaacggtgaaaagattccaatggctgttaagaagggtgacgtagttctttacgataaatactcaggcactgacgttgaatacgaaggtgaaaagtacttagtccttcacgaaaaagacattttagctattgctaagtaatttagttaaaatttccaacgataattaagtaaattaaggagcatagataatctatggcaaaagatattaaattctcagaaaatgcaagacgttctcttttaaagggtgttaataagttagctgatactgttaagactactattggtcctaagggtagaaacgttgttttggaacaaagttacggcaaccctgacatcactaacgatggtgttaccattgcaaagtccatcgagttaaaggatcactacgaaaacatgggtgctaaacttgttgctgaagctgctcaaaagactaatgatattgctggtgacggtactactaccgcaactgttttgactcaagcaattactaatgaaggtatgaagaacgtaactgctggtgctaacccagttggcattcgtcgtggtattgaaaaagctactgaagctgctgttaatgaattgcacaagattagccacaaggttgaatcaagagaccaaattgctaacgtagctgcagtttcatcatcttcaaaggaagttggtaacttaatcgctgacgctatggaaaaggttggtcacgatggcgttatcactattgaagattcacgtggtatcaacactgaactttcagtagttgaaggtatgcaatttgatcgtggttacttatcacaatacatggtaactgacaacgataagatggaagcagatcttgataatccttacattttgatcactgacaagaagatctcaaacattcaagatatcttgccacttcttcaagaaattgttcaacaaggtaagtcattattgatcattgctgatgacgttactggtgaagctcttccaacacttgtattgaacaagattcgtggtaccttcaacgttgtagctgttaaggctcctggctttggtgaccgtcgtaaggctcagttacaagatattgctgctttgactggtggtactgtgattactgatgacttaggtcttgaattaaaggacactaagattgatcaattaggtcaagctcgtcgtgtaactgtaaccaaggactcaactactattgttgacggtgctggttcaaaggatgctattcaagaacgtgaagattcaatcagaaagcaaattgaagaatcaacttcagactttgacaagaagaagcttcaagaacgtcttgctaagttaactggtggtgtagctgttatccacgtaggtgctgctactgaaaccgaattgaaggaacgtcgttacagaattgaagacgctttgaactcaactcgtgccgctgttgatgaaggttacgttgctggtggtggtactgctttagtagacgttgagaaggctatcaatgatcttaaggctgatactgcagatgaaaatactggtatccaaatcgtattaagagctttgtcagcaccagttcgtcaaattgctgaaaacgcaggtaagaatggtgaagttgttttgaaccacttactcaagcaagaaaacgaaattggctacaatgctgctactgatacttgggaaaacatggtagatgctggtatcattgacccaaccaaggtaaccagaaccgctttgcaaaatgctgcttcaattgccgctcttctgcttactactgaagctgttgttgcagaaattcctgaagaaaagccagctaacccagctccacaagctggtgcaccaggaatgggtatgtaattatatatcttaatgctttagcatttagatatataattcttgattacgaagtaatcaagttcatttacagtgctttagcactaaacttatgcacaaactctcactctagttcaaaaacaaatataattaaaatgacttcgaagttaaacaatcagttcagcttcgaagtttttctttttgtagcgtataatattgtacgtaactctatctaaaatacgaaataggaaagagacataaatgacggaaaaaacaactccaatgatggagcaatattacgaaattaaaaaacaatatcctgatgcctttcttttttatcgcgtcggagacttttacgaactgtttgaagatgacgcagttaaaggtgcacagattcttgaattgactttaacgcaccgatcaaatagaactaagaatccaattccaatggcaggtgtgcctcatatggctgtggatacttatgtaaatactttagttgaaaagggttataaagtagcactttgtgaacaacttgaggatcctaaaaaggccaaaggcatggttaaacggggaattattcaattagtgacgccgggaaccatgatgaatgaaggcccaaatgatgctaaagattcaaattacttaacatcagtaattaccactaagagtggctttggtttagcctacagtgatttatccactggtgaaatttatgctactcatttaaagagtttcgatgctgtttccaatgagctcttgtcacttcgtactcgtgaagttgtgtataacgggtcattatctgaacaaaataaagactttatgcacaaggccaacattacgatttctcgacctactccaattgaaggtgaacatgctgaaatttcttatgttgaacagaatttgactaatggggctgaaaaagaggctacccgtcagttagttggctatttgctttcaactcaaaggagaagtttagcgcacttgcagattgccaaaagctatgaagtaaatcaatatttgcagatgtcacatactgtgcagaataatttggaattggttgcttctgccaaaactggcaaaaaaatgggttcacttttctgggttttggataaaacacacactgccatgggtggacgcttgcttaagcagtggctagctcgtccattattaaacatggatgaaattaaccatcgtgaagaaatggtgcaggccttgcttgatggctactttacacgagaaaatgcagttgatgccttaaagggtgtttacgacttggaacgtttaactggtcgaattgcttttggtaacgttaatgcgcgcgaattactacaattatcacgttctttgcaggccgttccagttattttagatgctttagagcaatcagattcagatatcttggtcgattttgctaaaaaaattgatccattaaagggcgttgccgaaatgattacttccactatcgtgaaggatccacctgtgttgactactgaaggtggcctgattcaaggtggggttgatccgcagcttgatcgctatcgggatgccatgaacaatggaaaaaaatggttggctgaaatggaagcagatgagcggcaaaagacaggtattgataacttaaaggtcggttataacaaggtctttggctattatattcaggtttctaacggtaacaagtctaaggtgccacttgatcgttatacgcgtaaacaaactttgactaacgctgagcgttatatcacaccggaactcaaggaacatgagaatctaattcttgaggcacagacacggtcaactgacttggaatatgatttatttgttaagctgcgtgaggacgttaagaagtatatccctgctttacaaaaattaggtgggcaactagcagcgctggatgtttattgtggttttgctacagtagctgaacaaaataattattgccggccaacttttcacgcagataatcaagatattaatgtgactaacggccgtcatccagttgtggaaaaagtaatgacggctggttcatatattcctaacgatgtcaaaatggatgaaggaaccaacatttatttaattacaggtcctaacatgtctggtaagagtacctatatgagacaaatggctttgattgcgatcatggctcaagtaggttcctttgtgccagctgatagtgctgatttgccaatttttgatcaaatttttacaagaatcggagcagctgatgacttaatttcaggtcaaagtacctttatggtagagatgagtgaagctaatgaagccttgcagtatgctactaagcgcagtttggttctctttgacgaaattggtcgtggtacggctacttacgatggaatggctttagctggtgcaattgttaagtacttacacgacaaagttggtgctaaggcattatttgctacgcactatcatgaattgacagtgatggatgagactctggatcatctgaaaaatattcacgttggtgctaccgaagaaaatggcaagttaatcttcttgcataaaatcctacctggacctgctgatcaaagttacggaattcatgtagctcaattagcaggtttgccgcgcaacgttttgcgagaggcaactaaattattaaagcggcttgaagcacaaggcagtgaactagcaccagtttcgcagcaattagatttatttgcagagcctgtggaaaacagtgttgaagaaactgaaacacaaaatgacaagcccgcaataactgatgcacaacaagatatacttgatgatatttctaatctttatttagcagataagacaccgttgcaggttatgcaaatggtagctgattggcaaaaagatttaaaggatgacgattaatgagcaaaattcatgagttatcggaaactttaactaatcagattgcagccggagaagtaattgagcgcccagctagcgtagttaaagaattagtagaaaactcgttagatgctggtgctactcgaattcgcgttgattttgtagatgctggtttgaaacagattgtagttcaagacaatgggacggggattgcacgtgatcaagttgatctagcctttacccgacatgcgacaagcaagattgccaatgaacacgatttatttaaagtttccactttaggcttccgcggagaagcattagcttcgatttctgctgttagccatgtggaaattctgactgcaactgaaaacgcaattggtattcgagctaactatagtggaggcaataaaaaaggccaagaagatgcagcggctcgtaagggaacaaaaattacagtcaaggatttgttctttaacacgccagccagattaaagtatttgcgtagttcaagaactgaaattatgaagattgtggatattattaatcgacttgcgttaggttatccacatgtgtcttttactttgtcaaatactggcaaaattttattaagaacgccaggaaataataatttaaagcaaacagttgctaacgtgtatggccgtcatatcgcagaaaaaatggaaaaatttgaggcaaaagacagcgattttaagattacaggtctgatgtctaaaccggaattaacacgttctacacgcaattttatttcgattctcttaaacggccgctatattaaaaattttcaattaaatactgcgattctggatggctatggctcaaaattagcagcgcggcattatccgattattgtgttagcaattaaagtagatcctttgttagtggatgttaacgtgcatcccactaaacaggaagttcgtttatccaaggaaaaagaactgggtcgtttaatcaccagtgcaattagtaatacacttgtggaaaaagttggacaaattagcgcttttgctaatttggaaaataaacgtgatacgctagttgatcagcttagttttaacttaaatcaagatgttgtaaatacagctcgtaaaaaagaaccggaaattcgcgaacaagaaaagccaaaatttttaacgattgaatctgatgattcagaagataatattcaaaatgaggcggtaaagcaggatagtgaaaagaaatatgttgatcttaatcagccacgtgaagatgatcaatatatcgttactaagacctggaaacaaaatgttgctctgcagcaagcactaacgccatttcctacaactaggactaatcaggaagtcatttcaagtggggatgaaactttagctaataatctgcctcgcttggtttatgttggacagaccgatacttatttatttgcccaacataatggcgacctatttttaattgatcaggttgctgctagacgaaggttaaaatttgagcaaatttttcacatgataactgccaaaaaagtagtacaacaaggtttgttaacaccaattattttagaatttggtaatcttgattttatgcaaattaaggatcaagtagaacagattaagcaggttggaatctatttggaagattttggacaaaatagttttattgttcgttcgtatccaacttggattcacgataatgtcgaagattcaattcggaagattttagatggttatttgaatgtggataaaggaaaggcaaagaacctgtttagccggatagcagcaatgcaagctaagcgagaaattactggcaagattaaattatctgcagctgaagctgagcaaattttacttgatttacgcaagtgtactgatccatatcatgatgcagatggacggataattttggttagaatgagccaaaatgaattgagaaaaatgtttaagaaggatgaataatgtacgaatattttgaaggtgtgattactgtggttacaccaagctatgttgtagttgatgtcgggggcgttggctacaaggtctatagtcctacaccttttgcctatactcaaggccaaaaagctaaggtctttattgagcaagtggtgcgtgatactggcattactttatatggttttcaaagtcaagatgataagggcttgttcttaaaactacttagtgttagcgggattggtcctaagagtgcaatggcaatcatggcagctgaggatagtaattctttggcggaagcgattgaacaaggtgaagttaagtacctaactcgttttccaggtgtgggtaaaaagacggcttcacaaattgtgcttgatttgaagggtaaattaggtgattatgttgctcggcttgatcgtccagacaatggtgagaatgtgccgccagcattaaatgatgcactgcttgctttaattgctttgggttatacccaaaaagaagtggatcggatcacgcctaaactggagaaagttgctgcaaatactgcagatcaatatattaaaaagggcttagcattactgcttaaaaagtagatcttggtataatagaatagatgattattttttaaggaagtgaaactggtggcagaagatcaagtaacttcaggtgatattgagaatcctgaagaacaacaaatggaactttctttgcggccgcaaacgctcgaccagtacttaggtcaaaagcgggtcaaaaaagaaatgagcatttatattaaggcggcgcgccaacgtgatgaagcattagatcacgttttgctttatggaccaccggggttaggaaagacaactttggctttcgtaattgccaatgaattgggagttcatttaaagagtacaagtggtccggccattgaaaaggcaggcgacttggtggcacttttgtccgacttagatcctggggatgttttgttcattgatgaaattcaccgtttagctaaaccagtagaagaagtactctactctgcaatggaagactactatatcgatattgtgattggcgaggggcagactactcatgcagttcacgtgccgctgccaccatttactctaattggggcaacgactttggctgggcaattgtcagcacctttgcgtgatcgctttggcatcgtagagcacatgcagtattacactatcgatgagctagaacaaattgttttgcgttcaagtgatgtttttcacacttcaattgcgcctgaggcggcccatgaattggcacgacgctcgcgtggtacacctcgtgttgccaatcgcttacttaagcgggtgcgtgattttgcggaagttaagggagaaaaaacaatttcgctcgagactactgaaggcgcgttaaaacaattgcaggttgacgatgagggacttgatcagacagaccgcagattattgagaacgatgatcgaaggatataatggtggtcctgttggtattcggactttggcagctaatgttggtgaagatatggaaacgattgagtcactatatgagccatatttgttgcagcatggttttattttactcacgccgcgtggcagaatggtgacggataaagcatatttacagttaggattaccaattccaggtgataaatagtcccattttctgtataatggttataatatctagaaaataattttaatgaggtggaaattttgaacattttatttttagcaaatgccggtgctgcagcaagtagcaactggatgatgatcggtttatttattattttgatcgctttcacttactttggtatgattcgtcctcaaaagaagcaacaacaacaaagaatgcaaatgatggacaaattgaagaagggtgacgaagtcatcttagttgatggtttgcatggtaaggttgacaagatcaacagtgataagactatcgtggttgatgcagatggcatttacttaacttttgaaagaatggctgtccgtcgtgtgattccagttgctgcaccagcaactcctgcagctgaaactaaggctgaagctccagcagaaaagccgaaagaaaaagcagacgaaactaaaaaagaggataagtaatcatattacttaagagcgtcattttaggcgctttttgttttgctaaaaaaatccttgttgtaaaatagaagtgataattttagttcaaagaaagggatctgaaatgaagaatattcccgttgtaatgattctttttggtggtagtggtgatttggctcaccgcaagctttatccagctttgtttaatttgtatgaacaaggcttaattcacgacaactttgcagtaattggaactgctcgtcgtccttggtcacatgagtatttgcgtgagcaggttagtgatgctattcatgaaacgcacgatactgttgatgaaaatgagttgaaagcttttgcaagtcatttttattatcaatcacatgatgtaactaatgtggaacactatgagattttgaaaaacttggcacaagagctcgatgatcgttatagtgcacaaggcaatcgtctcttctacatggctatggcaccaagattctttggcacaatagcaacgcatattaatgaccaagacttgactggtagtggctttaatcgaattgtagttgaaaagccatttggtcatgatttggcttcagcagaggaattaaataagcaaatcacggcttcatttgatgaaaatgatatttttagaattgaccactatttaggtaaagaaatggttcaaaatatcatgccaatgcgttttactaacccaatggttcaaaatatttggtgcagcaagtatattaagaatatccaagttaccttggcagaacgtcttggcgtggaagcacgtggaggttactatgatacttcaggtgctttgcgtgatatggtacaaaaccatatttttcaaattattactctgctagcaatgccagaacctaaggatctttcttctgctagtgttcaccaagccaagcaagatttgcttaagagtttaattattcctacgccagatgatgtcaagaaatactttgttcgtggtcaatatttgggtagtgatactacttttgcttataagcaagagccaaatgttgatccagagtcaactactgaaaccttcgttgcaggtaaagttaagtttaatgagggaccaattgctggcgtaccaatttactttagaacgggtaaggaatttaaagaaaagaagaaccggattgacattgttttaaagcatattaataatccatatgggcaagctcattctaacaatattacgatcgtgattgacccaactagtgaaatttactttactattaatggcaaacgaattgaccaaccaggaattcgccgtgaaaacttaacttatgaattttcaaaagccgaaatggctaaggtacctgatggttatgaaagattgcttcatgatgtttttgtcaatgattcaactaactttacgcactggagcgaattgaagcgttattgggaatttatcgatgcagttgaagatgcttggcagaaggaaaatgaagcaggcaatccagccattgcacaatatttgccatacagaatggggccaaaggaagctaatacaatctttgagtcaccaactgaacattggatttatgaataaagaaaatttattaccgcaaaatgacatccatcgtcggattattcatctggacatggatgctttttatgcttcggttgaaatgcaggagcatcccgaatggaaaaataaggcattgattgttgggcaagatccacgacaaaatggtggacatggagtagtggctacttgcaattatgtagctcgtaagtatggcgttcattcagctatggccgcaattcaagcagtacgtttggttcccaaggagctaatagtttttactagaccacgatttgataaatatcgtgcagtgtcagctaaaatccattcttttatgcatgatgtgacagatcaggttgaatcagtggctttagatgaagcttatctagacgtgacacatccaaagatagagcaggagtctgcagttcaaattgctttagatttacagaaaaggattcggcaagaagtaggcttaaactcgtcttttggcgtttcctataataagtttttagctaaaatgggatcagaatacgccaaaccgtttggtcgaaccgtaattttgcctagtgaagtgcagaactttttagcaatgcaaaagattgagaagtttcctggtattggaccgaagacgcaagaagagctgcatcagataggtgtttatactggggcagatttagaaaaagttgaggttttaaccttaattaaaaaatttaagaaaatggggtatattttagcccaacatgcacgtggaatagatttaagacctgttgttacagactcagaggctaatcgaaaatcaattggcatggagcggacttacgagcctgcaatttatactgaggatgaagccctaaccaatattcgtaactattgcaatcatttggaagcagcattaaaaaaacgcaattttaaggcaggtactgttgttattaaagtaagaaataataattttgatacggtaaccaagagaaaaaagttgaaaacaccttctgatagttacttagatttttatgatgtggctcgtgacttgttcgaagcaacaagttcctttttagatgatggaattcgtttattgggagtcactgtaactgactttgaaaagaaaaaatatcaatcaatcagtttgttcgactaataaataaagctatttttctggtaaactagatacagatatttttacaagatgaggagattaaaaatgagtagttttgatgacatttatgaaaaaatcttacaatatcctacaattatcttgcaccgccacactagtcctgatccagacgcaattggttcacaagctggtttagctagagcattaatggaaaaattcccggacaagcgcattctttgtgctggggaaaacgatgaaggcgacttagcttggattaaccacatggatcaagtcaaggcaactgattacgaaggtgctttggtaattactactgataccgctaatacaccaagaatttctaataagttgtatgataagggtgactttttaattaagattgaccaccacccagatgttgatccatatgctgatatgagttacgtagatccagatgctccagcagcatgccaaatcattgtagacttcttgaatgaagagggctttaagattaccaaggaagttgcttacccactttatgctggaattgtaggcgataccggtcgtttcatgtatccagaaacttcagagcatacttttaaggtggctgctcaattagcttctactggaattaacattactgaaatcgctcgtaatattgctgatgtaacttttgatgaggcaaaattgcaagccttggcaatggacaagatggaaattgatcccgttggtgcagcttttacaattttgatgcagtcagacttgaagaagttaggtttgactgatgatcaagcaaatgttgctgtatctactccaggacgtattaaagatgtgcttgcttggaatgtttttgttgaaaaaccagatggtactttccgcgtacattaccgttcaaagggccctgtaatcaatgaattagctgctaagcatgatggtggtggtcatgcattagctagtggtgctaacgctaaggatatggacgaagtaaagcaggtatttgcggaagtcgttgaagtaactaagaagtttaaagaagatcatgaataatatttttatagattcaagaattaaaccagctattcaggctggtttaaagaagatccattttgaaaagccaactaaggtgcaggagaaagttattcctgctatgttgtctgacttgagtgtagtagtgcaagcagcaactggttcaggaaaaacgcatgcttatttagtaccaatttttaatgaaattgaagaagataaacgctatgttcaagcaatcgttactttgcctagtcgtgaattagccgatcagctttatcaagtagcacggcagctccgtgatgcggcagggatgcatttttcaattgcacatcttgcgggcggaactgatcgtgaacgtcaattagaaaagtatcaaaataatactccacaattggtgattgcaactccaggacgtttgttagactttgttcaaaagaaggtttttgcagttgatcaagtaaaaacttttgttatcgacgaagctgacatgaccttggacatgggctttttgaacgacattgatcaagttgctgctaaattgccgaaggatgtccaaattgctgccttttcagcaactattccagttaaattgtctaactttttacgcaaatatatggctcatcctgatgagatcgttattgataatcctagtgttattgcgccaacgattaaaaacgatttgcttgatattggctcaaaggatcgcaagaatgtcttgtacaaattgttaactatgggacaaccatatttggcgttggtttttgctaacactaagcaaaaggtcgatgagttgactaattatttgcaagatcagggtttgaaggtagctaaaattcacggtggggtaactgaacgtgaaagaaagcgcactctgcgtcaggttgagcaaggacagtatcaatatgtggtagctagtgacctagctgctcgtggcttagatattgatggtgttagtctggttgtcaattatgaaataccacgtgatattgagttcgtgattcaccggattggccggacggggcgtaatggcttatctggtcatgcgataactttaattcgtgaagaagaaatgaaccgaattgaagaattggaaaagatgggtgttcattttgacttcgttgaaattaaaaatggtgaattagtgccacgtaaacactatcgcagtcgtgaaaatcgtcaaagcaagaatcgtaagcttgataccaagctggtgggttacgttaaaaaagagaagagaaagcgtaagccaggttacaagaagaagattaagcgtgcgattcaagaggataatcgtcaaaaacgtaagttggaacagcgtcatgaggttcgtaaggcaaaacgtttgagaaagcgcaagcgtgaacaagggctttgacagaagcggattttgtagtacaattatttcagcttaagatatgttttttgatcaattatttcaaagagagagccagttagatgagaatggcttaataatagtcaaaaaatgctcctttaagtttcataattaagaatatcaagaggtaacaaacactgttgcaatcaaggtggtaccgcgcgtggagcgtccttgaagaaagcaatagtgttttttatttatttttagggagatttattttaatgaagaaactaaatagttcagagtttcgccaaatgtttttagacttcttcaaggatcatggtcacatgattatgccaagtgcatcattaatcccacaagatgacccaactcttctttggattaactcaggtgttgctaccatgaagaagtactttgatggctcagttgtaccaaagaatcacagaattacttcatctcaaaagtcaatcagaaccaacgatattgaaaatgttggtaagactgcacgtcaccaaactttctttgaaatgcttggtaacttctcagttggtgactactttagagatgaagctattccttgggcatgggaattcttaactagtcctgattggcttggcttgccaaaggaaaagctttactgtactgtttatccaaaagatgaagactcatttaatgtttgggtaaaggcagggatgccagctgatcatattgttaagttggaagataacttctgggatattggtgaaggtccatgtggtcctgatactgaaatcttctacgaccgtggtcaagaaaacaacgacgttgctgaagacgatccagaaaacttccctggtggtgaaaatgcacgttaccttgaaatttggaacatcgtattttcacaatacaaccacttgccaaatggtaagtatgttgatcaaccacacaagaacatcgatactggtatgggtcttgaacgtgtactttcaattttgcaagatgcaccaactaacttcgaaactgacttgttcttgccaatcattcatactactgaagaaatgactccaggtaagaagtacggtgaaaacaaagaagacactactgcatttaagattattgccgatcacgttcgtgccataagctttgctattgctgacggtgctcttccatcaaactcaggtcgtggttacgttttacgtcgtttgatccgtcgtgctgacttgaacggtcaacgtttgggcatcaagggtgctttcctttacaagcttgttccagttgtaggtaagattatggaaagtcactacccagaagtaatggaccaacgtggctttatcgaaaacgtaatccaaaacgaagaagaaagattccaatcaactcttgatactggtttgactttgcttgatgacttgattgacaaggctaagaagtcaaaggacaagactatctcaggtaaagatgccttcaagatgttcgatacttacggcttcccatatgaattgacttttgaatcagcacaagatgctggccttaaggttgacaggaagggctttgacgcagaaatggctgctcaaaaagagcgtgcacgtaaagctcgtggtgaccttcaatcaatgggacgtcaagatgtaactttaatgaacattaaggataagtcagtctttgaacgtgatacttacgaagaaccacatgcaaagctagttgacattgttgttgatgataagttggttgataaggccgatggcgaacatgctactttagtctttgacaagactccattttacgcagaacgtggtggtcaagttgctgatcatggtaagatttataaccaaaatggcgaattagtagctgaagttactgacgtccaacacgcacctaacgaccaaaacttacactttgttgaccttattttgccagttgaaaagggtcaagaatacgtattgaagttagataaggaacgtcgtgaagggttacgtcactctcactcagcaactcaccttcttcacgctgctcttcgtcaagtcttaggtgaacacactcaccaagctggttcattagttgatcctgactacttaagatttgactttactgcaatggaaccaatgaccaagcgtgagcttaagaccgttgaagaattggttaaccaaaagatttgggaagctattcaagttaagactactatcactacccctgaagagggtgaaaagatgggtgctttagccctctttgatagcaagtatggtgataaggttcgtgttgttcaaatgggtgacttctcaagtgaattctgtggtggtactcacgtggacaatactaaccaaattggaatcttcaagattacttcagaatcagctgtcggtgctggtatgcgtagaattgaagctgtaacttctaagaaggcttatgaatacttggcaaaccgttcagacttacttgatgatattcaagaagaagttaaggcaaccaagccagataacattgtcgataagattgattcacttgaaagtgatttgcacgatgctcaaaagcaagttgaaactttgaacaagaagatcaatgctgctaaggctggtcaaatctttaatgacgttaaacaagctggtgacttgactgtcattgctgctactgcagatgttaacgggatgaatgacttgcgtgaacttgctgataactggaagagcggcaacaagtctgatgttttagttttagctgctgaaaatgctggcaaggctaatatgattattgccttaggccaaaaggcattagacaagggccttaaagcaggtaacttaatcaagatcgctgccccaatctttggaggtggcggtggcggccgtccaaacatggctcaagccggtggtaagaatccagcaggcttgaatgatgctattaaggcagttattgacgaaatttctaagaactaagaattaattaattgtgtttaagctttttttcaagtaaaattgttgacaggaggaataaatatgagttcgctagataagactatgcattttgactttaatcagaacaaaggaaaaaatgtttatgatactctgcaagatgtttacaatgcgcttgaagaaaagggctataatcctattaaccagattgtaggttacttactttctggcgatcctgcttatattccacggcataacgatgcccgtaatttgattcttaagcacgaacgtgacgagattattgaagaacttgttaagagttatcttggtaagaataaataatgcgtttattaggtttagatgtaggttctaaaactgtgggagtagcaattagcgatgagctaggaattactgcccagaagttggagactatccagattgatgaaagcagatataactttggtatgcgtccattgaagaagctagtcagacaatatgaagttgacggtttcgtattaggtttacctaagaatatggatggtacttctggtagttccgtagctagaagtaaggcatacggcaaacgactagaggaaaagtttggtttacctgtacattattctgatgagagattgacaacaattgaatcacgacgagtacttgttgaggatgcagggatccatgatcgcaagaagcgtaaacaagtaattgatcagatggcagcggtgctcatcttgcaaaattatttagatttacaccgaaaggattaaaatggcagcacaagttaatggtgacgatcaagatcgtcaaattactttgattgatgatcaaggtaatgaagaattgtatgagatattatttacttttcattcagatgattatgacaaatcttacgtgcttctttatccagccgctgttggcgatgatgaagatattgaggtgcaagctttcagttatgatgccgatgatgccggcgatgtaacaagtagcgatttgcatgagattgaatctgatgatgagtgggacatggtccagggagttttaaatactttcttagatgatgaccgcttgagtggtaaataataaaaagaggactggctgtggctggtcctttttgttagttttagaaaaaagataaaaatgaacaagaaaatattagagattttagaatttggcgaaattactaagcgcttgagtaaattagcgattactggtcccgctaaaaaagaagcggaggaattattacctagtggtgattttgaacaagtacaaaatgagttaaagcagactttagctttgactaatttgctacgaattaagggacaacttcctttaacggactttcaggacgtacgtccaagtactaaacgtttaagcatgaaagctaatctaaatgctaaggagttaggcaacttattattggtattaagtttagctcatgaaattaatgatttcttggcagaaatagatccaaataaattggatttgaccgcaatcgatgcaattttagatcaattagatgtgccagatctcttatttagagaattaaagaaatcagttgattatgatggcgaagtattagatacagcttcacatgagcttgctcgtttgcgtcatgatatacgttctaatgaagaggaaattaagaataagatggatgcttatactaagggcaatagtagtaagtatttatctgagcaaattgtgactattcgtgatgaccgctatgttattccagttaagcaagaatatcgggcaaaatttggtggggtagttcatgatcaaagtgccagtggtcaaacactgtttatagagccgaaagccgttttaaaccttaataaccgccaacagaatttaattgctcaagaaaaacaagaagttcgtaatattttgaagaacttatctaatttggctcgtgaagaaattactagtttgaataatattgcggctgcattaactgaactagatttcttgcaggctaaagccaagttagcaaaagaaatgaaggcaagtgagcctcgtctgacacaagaccattctttgaacttattaaaagcgcgtcacccattgattgacccagaaaaggtagtacctaatgacattcgtttaggtggtgaatttgatactatgctgatcacggggcctaacaccggtggtaagacaattaccttaaaaacagcaggattgcttcaattgatggcacagtctggattatttatcccggctgaagaaggtagcaaggttggcgtctttaagcaagtttatgctgatattggcgatgaacagtcaattgaacaatcgttaagtactttttcatcacatatcaatgacattattgcgatcatgaagaatgttgattctgagaccttagttttaattgatgaaattggtgcagggactgatccagaagagggtgctagtttggcaattagtatcttagactttttgcgtaaaaaagatgctaagatcatggtgacaacgcactatcctgaattgaagctttatggttataatcggccacggacgactaatgcctcaatggaatttgacttaaagaccttgtcgccaacttatcatttgcagattggtattcctggtcatagtaatgcctttgccattgcccgcaagctagggatgcgtgaagatgttgtcaaaaatgcccagaacttaatgtcagatgaagattctgatattaataagatgatcaccaagttgaatacgcaaaccaaggcagctactgtggctcgcaatcgtctgcaaaccagtttggatcggagccaaaaattggagcaaaagttgcaacaagcacttgattggtataaccaacgtgtacaaaaacagcttgattttgcacaagagcgagctaatgaagttgttgccaaacgccgtaaaaaagctgatgagattattgcccaacttgaaaaacaaaagaacatgggcgtcaaggaaaataagattattgaagctaaaggcgaactcaacagtttagagcgtcaggctaataatttggctcataataaggtcttacagcgtgaaaaacgtcgtcaccatgtaagtgtaggcgatcgagtaaaggtcctctcatatggtcagacaggtacgattactaagaagttatctgaacatgaatatgaggttcagatgggaattatcaaagttaaggttagtgatcgcgatattgagaggattgaaaagggcgaaagtactaagcctagacaaactgttagagcaaccagtgcggttagaagaagtaatgctcatagcgagctggatttgcgaggccaacgctatgatgaagcaatgactaatttggaccgatatattgattctgttttactggcaggacttgatacggttacgattattcacggtattggtactggtgcgattagaaaaggtgtttggcaatatctccgcagcagcaatcatgtaaagaactttaattatgcaccagctaatgaaggtggcaatggtgcaacaattgtacaattaaagtaagcgtcttacttgcaaaaagtaagtataatagaatatacttataatataaataaatgaattgaaaaaatgtgaggtaataattatggttgaagcaattaatgatcaaaattttgaagaagaaactaagaatggtgtagcattagtagacttttgggcaacttggtgtggtccatgtaagatgcaatcaccagtaattgatcaattatctgaagaacgtcaagacgttaacttctacaagatggatgttgaccaaaatcaagatacagctaagaatttgggtattatggctattcctactttaatcgtaaagaaggatggcaatattgtagaccgaattactggttacactccaaaagaaaagttaaaccaaattttggatcaatatactgattaatttaaaaatcaaaaaaggcttgagacgatgttgcctcaagcttttttgatatatcacttattttgatttacttgcttttttagcaagtcacgaatttcttctaaatagtcggcctcagttggaccagcttctttttctttcttgggcattactctatttaaagccttgatcattaaaaataccacaaatgaaatgatcaagaagttaatgacagaattgatgaagctgccatatttaaatgtagcatccccaaccttaaaaacgaggttagaaaaatcaattttgccggcaaagatcccaagtagggggttgatcaagttttttactaaagattgtacgatagcagtgaaggcagcaccgatgattacaccaactgccatgtccattacattgccacgtgaaataaactctttaaattctttaatcatgctctactcctatatctaatatacgcgtggtgctagttaaatcgttctaggcaatatgccatattataagctaaaatggctatttctagccgctgctgaaagccagctaagctccttgctcggttattttcagcgttatagtaactgagcaaagaaaagtcgctttcaattgttcttctaattgccatcagttgatgattattatgttttttagcacctttcatgttttttcgatatggtgtccaaaggacatagcccataccttttaactcggcagctaagtcttttcctaagtagccttcatcgcctaaaagataatggttaattggatgagcattaatcatcaattctactgtttctttggcatcatgcactgatgctttagtgactgcgtagtcaagcaaatagccttcatcgcttactagcgcgtgcaccttgaaaccataataatagactttcttggttgctttatagccaatatcggctatgtcacggaagatcttaacacgataattacgaacaggctgacaaactggaacaggaaaactgtcaataattaaaaattctccagcaacctttacctcttgattccaagcttgacggatgcagcgaattaaaggcaaaagcagcttggctcgacgattaaagcgagaatgagataagccaacaaaaaatttacagaatcttctttgggattcaattccaatttcagtttgccaaatgagcatcgctaagatggagctgtcggaaagctttgtttgatcaatgttttttcgatgcgtaagcttatcaggcgcataaagattatatagtgaacgacaaattacatttaaacgactaaaactaacttgtaaatggtgagagaaacgattaagcttgaggtagttcaattagatcagactcttttctatttaatttacttacaacttgagtctaatccgattggacttttttattaactaaaacgatttaactagcaccacgcgtatctaatatatctaaaaaaatgcgattttaactaaagtatatagtagtggttatttatagtctatcaatttgcttttaaccgaagcgagcgataaattgaactttcttttctttatctaaaatattaatttcacattcggtggttcgaccagttgatttttgaaatgcttccgcgatcattccgccttcaagggagaattccttgctggcgctattcaaacgatcagtgacagtttggccacttaattcgtaagtagtaaatgatcgtctttctttaactttttctagcttaccaaattcagccatgttgaagaattcaactaaatcatcataatcacttaaatcatattttcgcgcgattctcttgccagcccaataaagaattgaggcgtcatcatcgcctaaaatagttggcaaaaggaaatcgcggtaaagttggttaataaaatatacgtgctcgtttgtgttttctgtgttttctgtcataaacttgttcatcccttttattcttttttattttaccgtaaactagtagaagtagaaaataaatttttgattttaagagggttttattatggataatcgtccgattggattattggattcagggctaggtggcctatctgttgcaaaaaaagtaattgaaaaattgcctaatgaatcaactgtttttattggtgataacgctcatatgccgtatggcgatcgaactaaagaagagattattgaactagttagaaaatcagtccaatttttgttagagaaaaatgttaagctgataatttttgcctgcaatactgcgacagcaatggctatgagtacgattcaagcagaaatcgatccacaaattatcggagttattcagtcggggagtttggccgcttcacggacaactaagaataaaaaagttgcggtagtttcaactaaagcaacagcagaatcacatgcttatgctaaagagatccgtttccgtgatccagaaattcaggtaacggaattagctgcccctaaacttgcaccacttgtggaggctcaaaaagatcatgaaaccaacttaaaagtagttaaagagagtttgacccccttacaaggaaaagactttgacactttaattatgggctgtacgcattatccattgattcagaaagaatttaaagaagcaattaatgataaaaatgttactatcttggatcctgcagatcaagttgcacagtatacgtttaatgtgatgcggcgcgatggtttgtttagtgatggtaatgaaaaagtcagtcatgaatattacactacaggcgatccaactagttttgatcatttagcaaggacattcatggatgatgcaactttaacatctaagcatgtggatacggagaatgaataatggttaaagaaattttatttgcgactggtaatcaaggtaaagcaaaagaactaaaagaagcctttaaacaagctggggtaaatgtcgagattaagacgaatgctgacttagacaatccgcctcatccgattgaaagtggccatacgtttgaagctaatgccaagattaaggcccatgagttagctaactttagcaagttgccaacgattgcagatgattcgggcttaatagttgatgccttaaatggggagcctggtgttagaagtgcacggtatgcaggcgaagctcacaatgacgcaaagaacaacgccaagttattagctgaattaggcggtgtaccggatgaaaaaagaacggctaaattttggactacgattgtagtttcgatgccaggtgaatttgataaggatttggttgtgtcaggcacttgtagtggtcgtattttagctgcaccgcgcggtgaagacgggtttggctatgatccattgttttatattccggaaaaagaaaaaacttttgcacagatgactactgatgaaaagaatgagatttctcatcgtggtaatgcagtgcgaaaattgctccaagaattgccagcttggttagaacaatttgattagataaaaatagctcagttcgggtcattgatgtgtgtgatttgaactgagttatttttagtgaaatgaggtggatatatatgtcaaaaagtattggggaagtgctgaaagaggaaagacggtctttaggattaacacaggaacaatttattaaagggattattagtgaatcgttttattcaaaagtagaacgaggtaagaatgaaatagtagcagtagatttactaaagattttagctgctaataacattagtgaagaagaatttttaagtaaactaaatgttaaggaaaataataatttagaggaagacttaaaagttcaattacttaatgcatattctattcatgataaaaagaaaatcagaatgttagtccaaaaaatacaaaatgcagctatggatgaaaatactaaaatatcagctcgtttgattgatgcagttgtaaataataagattaatgatttaactcaaagagaaattacacaaattaagagaaaattttttgaagttgatgattggaccaaaaatattacaaccttacaacttttttgtaattcaatgcttttgtttgattttgatgagctggttctttttgtaaaaaaaatgaaaaaaacatgtaaagggaagttgatgaaattaccatttaatactcaaaagataattgcatcgatttgcataaattattttcataattgttatacaaatgattgtggtcaagatgcaagctatggttatgaaataatagaagaattagctaatattccggattttggaatatatgtgatagttactaatttttataaggcatattttcaaggcaataaaaagcaaagtcaacagatattagatttcttgaatcagaatggactaaacgaaatatctagcagattgccatagtcatatatgaagatctaattcaaatgtgaagaatttaggacaaatttaatttgttgcttataattttaattaagaaataattgattgggaggaaagtaattatgaattggcctaattttccacaattaccatagccttaataattatttctctgtatttttaggaggtgttatttatgtcagagtcagcattacttaacttagatattagtgaaagctcaatccaagcatttgatgaggtagaggtaagcaatcgctcaagatactcttcttgctcatgcattaacccaccgtgtcctattgcaacaatggattaaacaattgctacaaagtaagaatcaagaaagctcttaggaattgcctaagagctttcttgataatataaggagattggtatggaagaagtttgtgtattcccatttgtattttcgcgacaaccgattttgtctacagatgttttatttaagaaatttgataatttagatgagatagtagagttttatttaaacgaagatttagctcttaaagcacttcaagagagactgtaaaatattttgtgtaaggatgaatgattccttaaatttatttctttaaacattagaaaaaggagttcctttctcgtatgattggtttgaacaaaaaaacacatacagaaagaagaactccttcatgaatgattttaccaaagattttgctcaagctctattcaatccagacaaaataaatgatttattgcgcaaagagctacaacaggctgttaataacttgttagaagctgaattgactgcctttctgggctatgatccctatgccagaaatggctggaatactggcaactctagaaatggtgcttatttccgcaaagttgatacgcaatttggcccaattgaagtgcaagtgcctcgggatcgcaacggtcaatttcatcagcacacgctgcctggctacaagcagcactcggatatcttggaaagcatgattatcaagctttactccaagggcgtgaccaccagggaaatagccgatctaattgaaaagatgtatggcagccattacagtccagctcaggtatcaaatatttccaagcagatgattccaaaggttgaggcttaccacaaacgcaagctaagcgacaagtttttctgcgtctatttggatgcgacataccttcctttgcgccgagaaacgtttgagcgtgaagcagtctatattgccattggcattaaacctaatgaacataaagaagtcattgactactgcattgcacctagcgagaacattgaagtctggacagatatgcttcaaaacatgaaatcccgaggcttaaagcaagttgagctttttctttctgatggtgttgttggcatgaaaacagccttggccaggacttatcctaaagctcattttcaacgctgtttggttcatgtcatgcgcaatatctgcgctaaagtacgcgtcgacgatcgtgaaaagatcatgaacgaattcaaacaggtgcatcaacagacaaacaaagaagaagccacagctgtcctgcatgacttctataccaaatggggcaaggtttacagccatgttatcagaagcttgaaagacatagaaccagatctgctggtcttttataactatcccaagcagatcagagcttcaatttattcgactaacatgattgaatcatttaacaatgtgatcaagcgcaaagctaagcctaaggcagagtttccaactgaacagtcgcttgatgcttttattggcattcaggcaatgagctacaatgaccgttatttcaatcgaattcataaaggctttggtcaggttcaggacaccttagaatcctactttgattaaataaataattaaaaaatcaatttacgagaaagatctatttacacaaaagatttgacagtttcataaagttagagtatatggatgatccatttaagtattatagtattttaatgtcgtttattcatatgcatgttaatagatatttagcaccaagtaaaaaggaagaacaaaatatttatttaagtgtgttggaatattatcgaattaaagaggatgctaataaatatggaaaatttagaaagtaagatactttttcattcatataaaattggtgtaaatgaaagtaaatcttccttgaaagatattagtttggctgatgggttagctggaattagcatttttctatctaatttttataaatcagttgatgaaaacacggtaaagactaaaattcgggaaacgaatttaaaagtaatcaccaaggttgtgaaagaaattaatagtcaaggaacggttctatctttatttggtggtttaacagggataggcgctgcatgtatggaggctgcagaatatgataataaatattattcattattgattaaagttactaggactatagttgaaaaggtaaatattgtatttaccaaatctgatatttatactaatttaactttccaaatctacgatctatttaatggagcagtagggatatcactttttttagtaagagcatataaaaaaggagtagatgttcctgatatagaaaaggcaatacatcatttaactacatttctggtaagaatttcagtaattgatactaaatgtttttctaagtcattattatttttgcctgctgaggaattacctaaaagcggatatgcgcatcaactattgcctaaaggcgctttactaattggagaagcgcatgggttagcaggaattttagggtgtttaggtacaatttataaaatttttccatcttcacatttgaaggagcatattcagaatatattaaaatttttgcaggaaattagagatgacagggtattatatccagaatacgtattagtttcaaagaatgatactcctgagatagctactcataagcttaatgggggatggtgctttggatcattaggaacaacatactctattcttttgagttctgaaagcataagtgacgataaatttgttgatcaagccaagaaagatttgttttttcttcttagtaattggaaaagtgatattcgtagtgattcattgataatgtgtcatgggcttgcaagtcaaatttatattgctaatgtgttgaataaaacttatgatgacttgcattttgaaaagataattactaaaatgatagattttgttgtacatgcagcaaattggaaagagaaatatttattttcagatgttgcaatgtcactaaaaggtaaaaaaagatatgaaagagggatacttgagggagaattaggcgtaagtctagttttaaattcaatagtttctaatgttaaatggaatactgattggatgtttttgtttggatagaggtgaataaaaatgaaggcacaatatttccaagctaattttcggattgcacgtaagtctaaaaagaatatggtgcttgcggttttgttaatactttgtatgatcttttctgtactagttgtagaggagcaaaaaatcaatgatggctatcgtcaatggcgagactacaatgagtcagttcacgttaatgcagattatttttcgagtaatttattacggaaaaaggattacaaacagacctttaataatctgaacaaacaagcagaatatttagccggtgtacaaaatggtgaaatgttcgattcagctcaagattatttacaaaactctaaaaagttagttcaaacgatgctggcaggctatcaaaataattatcgtggtgcctcaactttaaatgttccgccaaaataccaactgtggcagaaattagtagtttatgattatttgtaccagaatcatttggcaattgtgatgaattctaaggagtctagcacctacttaatctacgttttaagtttaatcggaatgttcttatttttttacattctgtttattgctagcgatagttggatgattaatttgttgcatccaactttgctgaaaaatattccttaccaaattagggatgaagttaaaagtaaattcatcatcaatcttgtcctaactttaattccgttagtaattgggatgcttggaagttatttatttgctggttttaagaatggatttaatagcttgaattatccagcggttttgtactttactcgaatcagcgcggttccattatggttttattgcttgttgtacttggcttatgcagttgtgctcgttatatttgtaaccagcctagcatttctgcttaatcaactgactcatagtgtttatttaacgatttttattgccactctggtttatagtatttcgtttttgccaggtagtattgttaaatatcttttctttttgccatcggtttatttaaacattagtaatgtcctagatggaaccgtttcgagtcaagcaatagtaccaacaaatttaataacagggatgcttgttttactagtgtggactgtagtactgattatgtggtttagacatttggttaaccagggcggtgttaagaaatgaaaaagcagtattttttatttcaattaaaaatatttttgactaatcctaaaaatgttgggttgtttttcattactatcgtgctttcactatattttggactagttagtgctcctcaacaccttgtgattgaaaatgttgatccatatgcaatttctaaagaatatcaagatgatcaagcttttttaaaggtggctgaaaaagaatttgctcgagcaaataaaggaaactccagttttaatcccagcgaaggagccaaagatgctgttactacgtatccaactgttattaagtatgatcatgaaagactgaaggctcttaaaggcaataattggcatttgtacacgaagtacagcagtatgtggtacaagaaaatggatgatttaatttgggttaaagaaaatcaaaattatatgtatccgttagagtattaccacaataataattacaaagaagatggacactttggttatcaaagaacatttcatttctacgatggtttgcttaaaagcaaagccaaattaaacaaaaatgtcttagaagaacggactactttgcaaagattacaacaatcgctttctggctggacgatgattattttaattataattataattatcattttatttacggcagatatggtaactaatgatcaaaaatatcgtacagtagtaaagaatatccctctttctaaaagaacaattctttggttgaaaactgcagttattgaaataggagttttatttaattttttggttgcctttgcaatcgtaatattatgtacggctcccaaatatggttttggctctttgaatttattaacaccgatttacactggtcgcttatattttaaaacgccatttgtttatcagactctaggacaatattgtcttgagtttctattttttgcagttgttctcacctttatttttattagattgactttgctattgtcattgatttttagaaacgaatatgtagctgttattgttgctagtatttttgctatgagtgctaaagttctttatttttcattgggtatgggctttgtttatccatttttgaaacacttaccaatgacatattttacaatcggcgaaagtttgactagtaatttatcgtatttaatggactcaccaggttggggctttaatgatggaattattccgttagttacattagcaattgtaattgaattaactatttggctattttgtcagtttagaaaagtagtattagtgaagtaggtgaaaacatgttaaaaattcataatgttaaattagcttttggcgaacatgttgtcttagatgaaattagtttaaattttcaaataggaactatcgtaggtttagttgcaccaaatggtacaggaaaatccacactattaaacgtaattttacataatcttgagccacaagctggttatgtagaatatgatcatttacgttatcgcagcaatcgtgagattattaaactgcatcgactgatttgtgcttttcctgatcaaagtgatctgtttccatttatgagcggtagggatcatttaaagctttatgcggatctttggaaaaattcggataaaaatgtagataatattattaataaattacagatggaaaaatatgttgatcgcccaacacaaacttattctttggggatgaaacaacggctttgttttgccatggtggttgcagctgatacgccagtaatgcttttagatgaggtgatgaacggacttgatccccaaaacgtacaattgatttcagattacttattagatctaaaaaaagaaaataaattgattattatggcttcacatttgttaaataatctacaatcttacgcagatcgtgtacttttcttgaaggcaggaaaggtaattgaagatctcgataatcaacatcaggctaagcagtatctgaaaattgaggcgaatgcaatagccgggacgtggttaaaagataaaagatttactaagttacctgataataaaattattgtgccactggatgataatctaggattagatcaacttatacttaaattgactaaagagaagattccatattcagttggtcgaattgatttggcagaattatttagtaaattttatggctaaggcaatttgattagataaaaatagctcagttcgggtcattcgtatgatttgaactgagttactttttacttattttgcagtagtttttgcaggtcgttctgtacttgcaaaaacaatattattttctcttaaaatttgaatatattgggtcaaatacaaatttttcacagcagattgtttaccaggcttaacttgaaaatgaatggaataaacaaatttttttcctgtttgctcggtcacaccaacgatagtaggaccggaaacaattgtctttttttcaggttgaatcttacgattgcattctttgattaacttgttaacttcatcaatatcatttttagtatcaagatccaaattaatgtctaatgccacaccgccatgagcaagattttgcacgatcgtaatattacggttagggatgaaaataattgagccatctgaacctttcagccgcgtagttctaagacctaattggacgacagtaccaacattagtgccaatttgtaccaagtcaccgacatcaaattgatcttcacttaaaataaagaagccgttaactaagtcgctaacaaagccttgcgcgcccatccctaaagctagggaaaaaatcccagcactggctaacaaagtgccaaccggtacacctagaatagagagaataccgaataaataaaagaagattaaggtatattggaaaacgctgttgatcaaagcggtaatcgttcgcgttcgtttatttttaaccgtgttatgcttggctaagtaattattaattattttatgaccaaaatgggataaaaggtaaaaaatgagtgaagtaatagctaattgccaaataattgacaataaattttggctaattttactccaatcaatttcaattttctgtatatttatgtgagtaggaatcttcatttggtgtcctttctattgcttacgggtataattaagaataacaagacattaattgagaataaaggatattcatgctaaactttttttagatgttgatggaggtagaaaatgacaatttcttatggtgctttagcaggcttaattgcggcgattgcattcttaattttagtattatttacgattccaatgctaattcggaccgcgaagttgttgaaagaaactagtgcaactattcaaacaactaacgagtcaatgaagaaaatttctgaagatatggatggcttgatggatcaaacttcggatttgttagataaaactaatgacctaatgaccgatgttaatggtaaaatgaagacgttagatccagttgttaaagctgctgcagatttaggcgaaagcgtatcagaattaaacgattcatctaaaaagatcgctaaacgctttagcagcaatcatttaagccgtacgggtcttatttcttcaatagctgcgacggcatttgcaagacgcaagcgtcgcagaggtgaaaattaataaaggaggaattcaccatgaaaaaattcgcaagtttcttattaggtgccgttgcaggatgtgcagcaggttttctcgcaggttcacttcttgttagtgatgaacaagttgatgacgttaagaacaagattaaagataatgacaagcttcaagatttgaagaagaaatacgataatggtactgaaatcgtcaagaatcaattagcatcattccctaagaatgttgaagatgattcagaattgaaggattttgacgacatcgtaatcgatgactcaaataaagatgacgatgacagtgaaaatgctgaagagtcagttaacgatttgaacaatgctgaaaaagatgatactgatgcagcatctacttcagaaaaaccacaagcttaattaaagtcaaaaagaaaaggagctggtcgtgatgatgatacattccctgtcaagtagacagtagaattacataaagcttttattcctcagttgattaataatcagctgaggattttttggcttctcttattttcttttcgtgtattttttgccagtatttctcaattcgatgatttggtgcaatagggcaattcttaatattgcctttcatcgcttctttgcgcctttcaccagcagttaaaccgttaaaacgtttctgtggatcttcattaatgtagtaatctattgtcttacaaatagaatcattaagttcatcataactggccacttgaggatgaagaataactcgcatttctttgataatgccttgccagccttccattggaccattatcaatacagcagccaacacgagacattgattgcgtcatgccttggtcttttaattggttttggaaaggtgcgcgagtaaattgaaaaccacgatcactatggaaaagcggatgagcattagggtatgctttaacagcctgcttataggctgcttgaactaaagcagtatcgtttcgtttactaattgcgtagccaacaggatagcgatcatatagatcaaacacagtacatagatatgccttaggcaggttagcagcaacgacttcagtgatatctgtacaccatttttcattaggtctagatgcattaaagtctctttttaacttgttttcggccgttttctcaggcgttgtatgcttgaactttagcttctggtatctaggcttttgtgatctaatgccattgatacacatcaagcggtaaacagttttatgataaaccggcttttcatcagacatctgtcgattaactgccatggtcatcttttccgtcccaaacagactgttgttagacttggttatttcaatgatctttgcttcaatctttttgtctcgttcttcacgcttactcggcttgcgcttaggatcaaagtatttgtaataagctgagcgtgctattttagcccatttgcacattaaatcaatcttccaattgtacttttgatggcagtcatggattaactgatatgtttcttgtttccagcgtctttttattgcggcttgtctgtatcttggttgtccggcaagcacatcctttctaactgatctaatttttttaggaattcgttcttagtttgttcttctttgagctgacgctctaattccttaatttttcgattagccagttctaactcagttagctcttctggcttcttatgtctgcctcgtttatctgttaatcctgtttcaccattagctagatatttgtgtgtccagctgtaaacctgctggtaagaacaatcaaatttgacagctgtttgagtgtaattcttgtcgtgattaagacagtattgaacaatctgaattctttcttgctgggtagtttttcttcttgctttagtcatatagacctccggatggggatcatagtcccgattttctatatgactattatacttggaaacccattctgatactgttccattgcttctaatgccatatttattagctaaagaaggtaacgacattttgccagctaaatattcttgaacaaccttttctttaaatgccttagagtaatgattattgtattgagcattacttagaagggtatcacgattgctttgatattgatgaacccatcttcttacttgcatcgctccacttttacttggcatcttaagccgtttagctatttcaacgctgctcctattaccattcaagtattgttcaactgcccatatcttttgatcgaatgaatatttactttttctggacataaaaaatcccacctccatggataattgaatactttatgtatttcaatcgtccactttagtgggattgtatcatgatcagctccttttttatgacaaaattagtctttaagtggcaaaacttttaagtccttgtcagtgtgagtaaaggtttcaaagccatccttagtaacgacaccacaatcttcaattctgacaccagcaaagccagggatgtagatacctggttcaatggagaagcacattccttcttcaagaactaagtcgttaccttgtacgattgatggatattcatgaacgtttttaccaatgccgtgacctaggcggtgaatgaagtattcaccatagccagccttagtaatgatgtcacgagccacgctatctaattcttcagcggtgattcctggcttagcagcttcgattgcggcttgttgagcttcacgatcaacttcataaatttcgcgttgcttagcagtaggttcaccgtaagcaacagttcgactagaatctgatgcgtaaccatcgtgcatggtacctaagtcgaataaaactaattcatttggttgaacagtgttcatagttggaccaaggtgaggattagcggcgtttttaccagcttgtacgatggtttcaaaactttcatgcataacacctttttgaatttttagttggtaatcaatttgaccagcgatgcttctttcggtgacgccagttctaattgcgtcaaagccaatcttaaaagcgaagtctgcttctgcaccagcgccttgcaacttcttgatttcttcaggtgtcttgtaaagacgaattttttcaataaaaggtgaaacatcattagtaaaactagcgttaggaaattcaccacgtaagagttggtagtgggcaacagacaaatcatctttttcaattgcccaattatgggtatcgtgagttctctttttgacattagttgcgatgatgctccaaggattctcggaatcaagatagccgataacatcgccatcccatgcagatgcttttgcttcttctacgtttaaagctgggcagaaaataaatggttccgcatcttttaaaacaattaaagcaaagattctctcatgtggttccattgagtaaccagtaaagtaggaaatggtgattggattagaaatgtaagcaagatcattattggagtcttgcaaccattgttgtaatttatctaagttcatattgtcctcttttcttgcaaattatgtttactgtagtatatcatgatctcttaatgaaaaaatgaaagaaaagctgtaaacgtttgcattttatgcagcatcgtgatatctttaagtgaaggattttttggaaggactgagagataagagatgcataaacaagaagttacaatctatgacgtcgctcgggaagctaaggtttcaatggctacggtttctcgtgttgtgaatggtaatagtaatgttagaaaagagacacgtgaccgtgttctcgaagttattaaaagactgcactatcaaccaaacgctgtagctcaaggtttagcttctaagcggactactacagtagggttaattgtcccagatttaactaatttatactttgcagaattatctaagggtattgatgatattgcacttttatataaatacaacatcattattactagtattgaaaaccgcttgatgaaggaagaccaagttattcaaagtttgctgaataagcaagttgacggtgtaatttatatgtctaaccgtttatcagatgcagcagctgatgcctttaagcggactgatactcctgtggttttagcaggtactaaagacaatcgtgatgattttgcttctgtcacaattgactataagaaggctgatactgaagcattaaatttgatgtaccatgatggtaagaagcatttgggaatcgtagttggtgatcaagatgctgtagttaacagcgaaaacagaatccctgcttatgaagaattcatggaagaaaatgatttgggcactcctcgaatctatactgatattaaagactattcagatggttataatttatacccacaattagttaaagatggcgttgatggtgtaattgttactcgcgatatttcatcagttggtattttgaattctgcgatggatgcaggtaagaaagtgccagaagatttggaaatcgtgaccgccagtgctacgcagttagcttctgttgttcgtccagctttgactacgattaagcagccactttatgatatgggtgccgtagcaatgagaatgttgactaagttgatgaacaatgaagaagtagatgatactcatattgttttgccatatgaattagttaaaaagcaaagtactttaaatcaataattaagtgaagcaaaaaagaccagtttactggtctttttgttttagtagataattttgttaatctgttgaagcttttgtgtaaaagtggttggtgcaattgcttgattaggattatagggcaaaagcacgagattagtgtactgactgacccgtggtaaggactgataatctctgaaatcgtcttgactaaagaagccatagaacaagatatcttttgccttaacccaacctagtttggtataaatccacatgtttttaggactaccattaaaattttgaatttttaataattgatttgcgggtaatttttgctgcgttttggcttggttatcaggataacgataaattgtaactttttggttaggtttagcgataattttcttattttgataaggagcaatatctcgctttgttaagtcaaaattaacgaattctgccgaaataaaagttttttcagcaatttgataaaataagcgatcatctacacggacgccataagtgacattgactttttgacctggttgcacgtacttcttttctttgatgcgaacatacggattcatcattgtagcggctttagttttaccaaaataaattccagttctattaatagcgtactttttagtgccacttttggctaatttatatttaaaaccagtagcgggatagttggtaaccacgccatcaacattccgattaattagccaatgccatagggcaggcgattcgtccatttcggcccagacaaacagttgcttatgtaatttgtgaagccagtgaattaaaaagggatgctcttgcacaatgtcagaagaagcattgatagcattaacttgaggtaaattactgaaattaatgcgtttcaggctaccaacgatcaaaattagataagcttcaggcataatttttctaaagtgaaagagactagcagcggaaaatgaatgaatcatgattcttttctgcatatggtattttttaactatttgtgcgattttatcctctaactcataggacggatttaatccatgatcaattttagtctctaagacaaatttagtgtttggtttattttgataatgcttaaaaagctcactgagtgacataacgtgttcgccattgtcatattgcagttgtttaagtgctgtaaaattattttgtgatacaattgcatgtgtatgagtaactcggaagaggtcatcatcatgtgcaatgaccggaactccatcctttgagagctggagatcgagttcaacgtaatcagcaccagaattaaaggcggaatcgtcagcctgaattgtttcttcaggatatttgatgggatcaccacggtgccctacaactgtaaaaccactatttatgaaaaagactaagctaaaaaaaagaacccaaacgagtcggcttttaaatttcatgtgtacacctctatcgcatacttaacaatagcatggttacacatttttttctatttatagtactattcttttatcagtaatcggtatgattgaaatctaaaggatgagatttaatggaacaattggacttaattgaagaagttaccagaaatgatggcagtcgatattatgaaatctctaatattgaccaaaatggaattgcagaattagctgcagatcatggcttaattaaaaaagtcaaaatactgcagctgaatattcctcgaactaaggcactgattgcttatgaaaaatatatcaatgatacttatgacttgcagactttgactaatgaaagtgattggaaaaatccaaaatgggtagaatgggataaacctaagggaaaaattttagacgcatataatatgatcttaaaagccaatcgaattggttagaaagtggcataaaaaatggaacaactgcgaattttacataccaatgatcttcattcacattttgaacatttccctaaaatcggacgttacttgaaaaaagcgcaggctgatcaatcggttgatggtatctacacttttgatgcaggagactttatggatcggtctcatcctttaactgatgctacggaaggtcaagccaacatcaaattgatgaatgggtttaactatgatgcaattacgattggcaataatgagggaatttctaatccacattgggtattggaacatttatttgatcatgcggactttccgacagttttagcaaatttgcgtgaagaagatgaatcaatgcctaaatgggcagtcggccatatgtttttaactactaagaaaaagacgcgaattgctttaattggcctgactgcagcttatccaatgacttatggtcctaatcattggcatgtcaagatgttaggtgacagtatggatcacgaattagctcaaattgaaggaaagtatgatgtcttaattttattgactcatgttggattaaaaatggatcgctggttagctaaacattatcctcaaattaatttaattgtaggaggccacagccatgatctgattgaacatggtgaaaaagtggggcatacttggattacgcaaacaggtaaatggggaaactatgtgggtgatattcatctagaacttgaagatcatcatgtgattaaggtagtacctcgcactatttctactgcttcgatgccagaagaaccggaagataaggcagtgattcagggctactatgatgaaggtaagcgacttttatcagaacgaaaagtggctaatttacctgaaaaatttgcggatgataaagtagcagccgttcaagtttctcttgatgcgattgctgattttgctaaaacagatttagccattttaagctcaggcctattcttgaccccgtttaagagtggaataattactcaatatgatttacaaaatgccttaccgcatccaatgcacgttgttcgttcaaccttgaaaggttatgatttgtggcgactagtgatggaaattgaaaagaatcggcattacctagaccattttccactgcaagggatgagttttcgaggaaaaatttttggtcagatgtattccaaagggatcaaggttgatatgcgtagacgtgtagtttacgtcaatgggcatgaaattgatccacaaaaagaatataaaattgcctgtttggatcattatgtcttagttccattttttccaactttggctattgtcggtgaaaatgagtttttattcccacaatttttacgtgaagttgttggtaaatatttggctgaaaaatatcctttaacagcgagaagtgaaaaagatgactgaagaaaataaatttgaacaagaacagccaattagacacccacttgctgacgtggtgcaagatggtaagagcattaagattggtgcgcagctttatagcatcattgtcaatgagcgagacgcacttgatttagaatctttgcgtaaaaaatatgatccttatcttgaccagtatgattatctggtgggggacgtttctagtgaacatttacgcttgaaaggcttttataaagacggtgctagaaccgcaattgataaaaaagaaatggcgatcgtggattatttaacggaatattgtaatcccggcggaccttattttatcttggaattaacgcatccagtacattattatcagcatcaacgtactaaaatacggcgatcacgtgaacgacgcgagcgcgattttggtaaaaatgagcgttatcatgcacgacgtcgaaattatcggaagaataaaaatgaaaataatccgtttaagaagcggcgtgttcatcaaactaaatttaagaaaaaacaatcaattgcagtgaaaaaagaatttggacggcatcattcatttattattaaaaagagaaagggaaactagtgaaagattaccgggtatttttaattgacttagacggaactgtttatcgtggtaaggaaacagttgaatcaggagtaagatttgttcatcgtttagttcaagcagggaaagactatttgtttttaaccaacaatacgaccagaacaccgcaaatggtagttgataaactaaagggacacggtatcgaaactgatacggaccatgtttatacgccaagtatggccacagctagctatattttacaaagagaacacaaggaaaagatcggcttgtatattattgggcagattggtctctggcgtgaattattgcaacatccagagtttgagcttaatgaagaaaatcccgattatgtaattgtcggtatggatacagatctgacttatcataaagtacgagtagcttcacgggcgattagacgtggagccacttttattgggactaatgccgatatgaatttaccagcagaggatgagctaattccaggcaatggttcacaatgtgcattcgttgctgcagcaagtggagtagagccactgtatattggtaagcctgaatcaattattgtaaaaatggctttggataaagttggctatagcaaagatgaggcacttttggtaggtgataattacgataccgatattaaagctggctttaatagtggagtagatcagttgttgactttgacaggtgtgacgaccaaagtggatattgcagataaacgtcaaccaacaattttagttaataacctagatgaatttgaattatgattactaaaaacaatattttttcgctgatttatcattttttgtttgctgtttctagcagtgtaattggggcaattgtggctagttggccattattgtttatttttatgatcgtacaaaagacatatgagacggttcacatgtctttgtttaaggtaatgcataattataaccagctgatgttttatttgctctggccctttaaaaagcagcttaaaatggataatttccctacatctgctaatgcggcagaacattttgcggaatgtaagcatttatttattctgactctattagtttttattatctgcatcatagtgcactttgtttttaaacgacaaaagaaaaagctactgcttaatttggataaatcagtagcccttattttgctattattgccaattattatttttccatttgcagtaaccaatttcgacagtttctttgtgatttttcaccatattttgtttaacaatagtgattggctgtttgatcctaatactgacccaattatcaatgtgctaacggaaggcttctttgcttcttgttttgccgttgctggggttatttatgaattatattttgctgaaaaattattacgtaagtaaaaaagagttccttagtggaactcttttttgagtgatatttttttcttgattgcgacaattgcgattggcacaactgatactaaaatgatagcaattacgatcattgaaaaatggtcctttacaaatggaatattgccaaagaagaaaccgatgattgtgaacaatcctgtccaaagcaagccacccaagatgttgtaggtgataaatttaccataatgcatcttactgccgccgaaaatgaatggaacaaaagtacgaataaatggtataaatctacctataatgatcgtaattggtccgtggcgctcaaagaacttttcagcggccaaccgattattttgattaattaatttattgaaccagctatgtttttcaccagctctggttgaccaggcaccaatttcatagttgatactgtcaccgattatggcggcgaatgctactataagataaactagccaaatatttaagccatacttaggattagcagccattgcactcgcagcaaaaatcaacgaatcgcctggaagaaatggaaaaacgactaagcctgtttcaataaaaatgatagcgaataagattaaataggaccaaccaccgaattggttaacaatcgtgattaaatggtcatcaatgtgcaaaataaaatcgattaaactcatctggaactcctaaaaactagttgaatgaattgtcaaagttttttcagggaaaagatcacgcataatcgcggtgattgcaatctgggcttcgccaaaaccgagagcgattaaagggacgcgtccaggataggtaacaacatcgccagctgcataaacagcggcgatattagtttgcattgttgaattcaccttaatttgtgcgccagctaaatcgattccccattttttgacaaagcgattattagctttaaagccatatgcaacgactgcttggtctaacttgatattagttaaactatcttttcccatttcttttaaattaacgttcagttgattatcaaccaaattgatttgtttaggaagatagggagttaaaatttcaacattttttaaagacttaagttttttgacattagattcaagaccgcgaaattgattacggcgatgaatgattttgacattggcataattagctaattctagtgccaggtctaatgctgaatcgccgccaccaaagacgccaactgtttgtccgacaaatttttggggatctttaataaagtaatgaatccttttttgagtatcatcatccatagataatggtaaagctttaggtttaaaggcaccggcaccagtggtaatcaatatgctgcgggatgcaactatatcatcgataataaagccgtctttttgtttagtgacattttcaactttatggttagtaaaaatagttgtatccgttaaattatgtcgtaaattgtcgattagttcagttcctgtaatagagtcgtaagcaggaatatctttgattttcttaaaaggataaagcatttgtggctgtccgcctgtttcagataatgaatcaaacagtacggtcttgagtccatgaagatgggcaaatcgcgcggcaaataggccaacaggtccgccaccgataatagttaaatcaaattttttaattttaatgacctcctcaaagtagtgatgtatcaactttaacatgaattttgtaaatattcatttaaaaataagcttgtcaaaaaatgaattttaaggtatattattgaagtcgcctttttaagagcgagcataattctttattaaaaaaatacttgcaattaatattcaagtattatatattaataaagtcgcttcgagagatgcgacgagagcttaaaaacagacatgcaaggaaagaaaacaaataaaaagaaaaaagtacttgcaaagaagtaaataagctggtaatatatttaaatgtcgtcaggtgaaagcagaaaaagcttgagcaagacgaaaaaacaaatcaaaaaagttcttgacaaagaaatgatggtttgataaaatataaaagctgtctgctttgcaaaaaagcaagacagaggtagtactttgaaaactgaacaaagtttcgctaaaagtgtgcgggtgtaaaaacccaaacaagaagcgaagtcaattcgcaagcaataaatttgagacaaagatcttaaataaggaatgagcaatcattcaaactttttaaaatgagagtttgatcctggctcaggacgaacgctggcggcgtgcctaatacatgcaagtcgagcgagcggaactaacagatttacttcggtaatgacgttaggaaagcgagcggcggatgggtgagtaacacgtggggaacctgccccatagtctgggataccacttggaaacaggtgctaataccggataagaaagcagatcgcatgatcagcttttaaaaggcggcgtaagctgtcgctatgggatggccccgcggtgcattagctagttggtaaggtaaaggcttaccaaggcgatgatgcatagccgagttgagagactgatcggccacattgggactgagacacggcccaaactcctacgggaggcagcagtagggaatcttccacaatggacgcaagtctgatggagcaacgccgcgtgagtgaagaaggttttcggatcgtaaagctctgttgttggtgaagaaggatagaggtagtaactggcctttatttgacggtaatcaaccagaaagtcacggctaactacgtgccagcagccgcggtaatacgtaggtggcaagcgttgtccgaatttattgggcgtaaagcgagcgcaggcggaagaataagtctgatgtgaaagccctcggcttaaccgaggaactgcatcggaaactgtttttcttgagtgcagaagaggagagtggaactccatgtgtagcggtggaatgcgtagatatatggaagaacaccagtggcgaaggcggctctctggtctgcaactgacgctgaggctcgaaagcatgggtagcgaacaggattagataccctggtagtccatgccgtaaacgatgagtgctaagtgttgggaggtttccgcctctcagtgctgcagctaacgcattaagcactccgcctggggagtacgaccgcaaggttgaaactcaaaggaattgacgggggcccgcacaagcggtggagcatgtggtttaattcgaagcaacgcgaagaaccttaccaggtcttgacatctagtgccatttgtagagatacaaagttcccttcggggacgctaagacaggtggtgcatggctgtcgtcagctcgtgtcgtgagatgttgggttaagtcccgcaacgagcgcaacccttgttattagttgccagcattaagttgggcactctaatgagactgccggtgacaaaccggaggaaggtggggatgacgtcaagtcatcatgccccttatgacctgggctacacacgtgctacaatgggcagtacaacgagaagcgagcctgcgaaggcaagcggatctctgaaagctgttctcagttcggactgcagtctgcaactcgactgcacgaagctggaatcgctagtaatcgcggatcagcacgccgcggtgaatacgttcccgggccttgtacacaccgcccgtcacaccatgggagtctgcaatgcccaaagccggtggcctaaccttcgggaaggagccgtctaaggcagggcagatgactggggtgaagtcgtaacaaggtagccgtaggagaacctgcggctggatcacctcctttctaaggaagcgaaggatatggagagcaggaatgctaagagaagtatccagagcaagcggaagcacactgagaaactttgtttagttttgagggtagtacctcaaaaagagctagtacattgaaaactgaatataatccaagcaaaaaaccgagacaatcaaagagaacagattgtagagcgaccgagaagagaattcttgagtaaggtcaagtagaaaagggcgcacggtgaatgcctaggcactaacagccgaagaaggacgtgacgaactacgaaaagcttcggggagcggtaagtacgcagtgatccggagatatccgaatgggggaacccaatgcagagatgcaatattgattagtgaatagatagctaatcaaaggaagacgcagtgaactgaaacatctaagtagctgcaggaagagaaagaaagatcgatttccttagtagcggcgagcgaagaggaaagagcccaaaccaagtgatttatcatttggggttgtaggactgcgacgtggcagtgtaagagatagttgaattatctgggaaggtaagccagagagggtgagagccccgtaagcgaaatctcaagcacgcctagcagaatcctgagtaggccgggacacgaggaatcccggttgaaaccgcgaggaccatctcgcaaggctaaatactagttagtgaccgatagtgaaccagtaccgtgagggaaaggtgaaaagaaccccggaaggggagtgaaaaagaacctgaaaccgtgtgtctacaagtagtcaaagcacattaaagtgcaatggcgtgccttttgtagaatgaaccggcgagttacgttatctagcgaggttaagtcagaaaagacggagccggagcgaaagcgagtcttaatagggcgaaaagttaggtgacgtagacccgaaaccaagtgacctacccatgaccaggctgaaggtgtggtaaaacgcactggagggccgaacccacgtaagttaaaaattgcggggatgagttgtgggtagcggtgaaattccaaacgaacttggagatagctggttctctccgaaatagctttagggctagcctcgtggagaggataatggaggtagagctctgtttggactaggggcccgtcaggggttactgaatccagataaactacgaattccagatatccatacacgggagtcagactgcgagtgataagatccgtagtcgaaagggaaacagcccagatcaccagttaaggtcccgaaatctatgctaagtggaaaaggatgtggagttgcgtagacaactaggacgttggctcagaagcagccatcattcaaagagtgcgtaatagctcactagtcgagtggcgctgcgccgaaaatttaccggggctaagcatagtaccgaaactgtggatgtgttttaaagagcacgtggtaggagagcgttctaagagcggagaagttgaatcgagaggatcaatggagcgcttagaagtgagaatgccggtatgagtagcgaaagataggtgagaatcctatccgccgaaagactaaggtttcctggggcaggctcgtccgcccagggtaagtcgggacctaaggcaaggccgagaggcgtagtcgatggataacaggtagagattcctgtactgtgtcaaatcgttaagagcgaaggagggacgcaggaggtgaagcacgcatcgcgatggaacgatgttcaagcaacaagtgcggttaagagtcaaatgcttctaaccagcaacacgagttgtgaagaggagtgaattaaaagtagcgaaggtgtggtaatcacactgccaagaaaagcttctagccagagatgacatacccgtaccgcaaaccgacacaggtagtcgagtggagaacactaaggtgagcgagagaactctcgttaaggaactcggcaaaatgaccccgtaacttcggaagaaggggtgctagccaagagattggttagccgcagtgaataggcccaaacaactgtttatcaaaaacacaggtctctgcaaaatcgtaagatgacgtatagaggctgacacctgcccggtgctggaaggttaagaggagagcttagcgtaagcgaaggtttgaattgaagccccagtaaacggcggccgtaactataacggtcctaaggtagcgaaattccttgtcgggtaagttccgacctgcacgaaaggtgtaatgatttgggcactgtctcaacgagagactcggtgaaattataatacccgtgaagatgcgggttacccgcgacaggacggaaagaccccatggagctttactgtagcttgatattgagtatcttttaaacatgtacaggataggtaggagccagagaagataggacgctagtcttattggaggcaatgttgggatactacccttgtttgaaggatgctctaacctcgacctgtaagccaggccagggacagtgtcaggtgggcagtttgactggggcggtcgcctcctaaagtgtaacggaggcgctcaaaggttccctcagaatggttggaaatcattcgcagagtgtaaaggtataagggagcttgactgcgagagagacaactcgagcaggtaggaaactaggacttagtgatctggtggtaccggatggaagggccatcactcaacggataaaagctaccctggggataacaggcttatctcccccaagagttcacatcgacggggaggtttggcacctcgatgtcggctcgtcgcatcctggggctgaagtcggtcccaagggttgggctgttcgcccattaaagcggcacgcgagctgggttcagaacgtcgtgagacagttcggtccctatccgtcgtgggcgtaggaaatttgagaggagctgtccttagtacgagaggaccgggatggacgcaccgctggtgtaccagttgttccgccaggagcatcgctgggtagctatgtgcggaaaggataagcgctgaaagcatctaagtgcgaagcccccctcaagatgagatttcctttgcgtaagcagtaagacacctcagagacgatgaggtagataggctgggagtggaagtcctgtgaaggatggagcggaccagtactaatcagtcgaggacttgaccaaagcgaagcaaactggaaggttttttgcgagaaggattatgtttagttttgagtgtaaaagctcaaaagagtacggtggcgaaagcaagaaggatacacctgttcccatgccgaacacagaagttaagcttcttaacgccgaaagtagttggtgggcaactgcctgcgaggaaaggaagctgccgtgctcaatatggaggattagctcagctgggagagcatctgccttacaagcaggaggtcacaggttcgagccctgtatcctccatatcgagtcgttagctcagttggtagagcaacggacttttaatccgtgggtcgagggttcaagtccctcacggctcatgaccctatatatgcgggtgtggcggaattggcagacgcgctagatttaggttctagtgttttcggacgtgtgggttcaagtcccaccacccgtattgccaaccacatattgacaatatgccgatttagctcagttggtagagcatctgtcttgtaaacagggggtcgtacgttcaagtcgtataatcggcatttatattacgcggaagtagttcagtggtagaacatcaccttgccatggtgggggtcgcgggttcgaatcccgtcttccgctttcatcaacacgccggagtggcggaattggtagacgcacgggacttaaaatcccgcggttggtttcaaccgtatcggttcgactccgatccccggcattgatgatgcgcccttagcgcaactggatagagtgtctgactacgaatcagaaggttgaaggttcaaatccttcagggcgcatataacgggaaatggctcagtttggtagagcacctggtttgggaccagggggtcgcaggttcgaatcctgttttcccgattgtaatctaatggtgattggttacattttggcggtgtagctcagctggctagagcgtccggttcatacccgggaggtcgagggttcgatcccccccgccgctataattgtaagcttggacctttagctcagttggttagagcagacggctcataaccgtcctgtcgtaggttcgagtcctacaaggtccataatatggcttttatattaatatcgcgggatggagcagtctggtagctcgtcgggctcataacccgaaggtcgttggttcaaatccagctcccgcaatttggtccattggagcagtggtttatctcgcctccctgtcacggaggagatcatgggttcaaatcccatatggaccgtaagatggctcggtagctcagtcggtagagcaaaggattgaagctccttgtgtcggcggttcgattccgtcccgcgccatttcattttatattaggtgcgggtatagtttagtggtaaaacgaaagccttccaagctttagtcgcgagtccgattctcgttacccgctttatatgggcctatagctcagctggtttagagcgcacgcctgataagcgtgaggtcgatggttcaagtccatttaggcccattggagacatactcaagtggctgaagaggcgcccctgctaagggtgtagatcgggttattccggtgcgagggttcgaatctctctgtctccgctatatagaaaagtaactgttctagattaatttctagagcagtttttttgtgtaccgagcggcattcttagtccgatgaaagtgttagaactaagagccagtagcaatgatattatgagtatgggacgtttacaaaggagtaaatacctgctgaaacagtaaggaattacaaatgtatcgtcttatatgcaaccatatgtatagtggatggaaggagatgagttcgttaagttctctctgcattgaaaacacgtcataagatgttaaaaccttaattttgagttattgataaacctaaatgcatattattttgaatgacttaatggaaattattacacttcttttaggtaaaagtcttggacattgattcaagtcaataatcgtgtatataacatagggagagccgattgttttaaatttcttcttgtatgatctatattaaaaaaataattttgtgggggatttcatagtgatataaagaagcagtttaatatggaacaatttataaagatcatttagttaaagataagagaagctgttttgctctagctaatttgaagtattaagatagatataaatgttttacaacaaaaaaataaaaaagtacttgcattttgactgaatatctattaatattaaatacgttgtgattgagagatcacaatagtaatagctaattaaaaaaataaataaaaagttcttgacttttgaaatgtgattagttattataataaagtgctcttgagtgagttacatgacccgttggtcaagtggttaagacacggccctttcacggccgtaacatgggttcaaatcccgtacgggtcattgccacaatttatttttttggcattaagcaatggaggattacccaagtggcttaaggggacggttttgaaaaccgttaggcggttctgccgcgcgtgggttcaaatcccacatcctccttagttgaatatcgcgggatggagcagtctggtagctcgtcgggctcataacccgaaggtcgttggttcaaatccagctcccgcaatttggtccattggagcagtggtttatctcgcctccctgtcacggaggagatcatgggttcaaatcccatatggaccgtaagatggctcggtagctcagttggtagagcaaaggattgaagctccttgtgtcggcggttcgattccgtcccgcgccatcatctggaggagtagcgaagtggctaaacgcggcggtctgtaaaaccgctctctctgagttcggcggttcgaatccaccctcctccataatagggatatcgtataaaggtagtacatcggtctccaaaaccgctagtgtgggttcaattcctactatccctgtttaccttcatggcggaattggtgaaggggttaacacactggtttgtggatccagcatgcgtgggttcgattcccacattccgccctagtattgggatatagccaagtggtaaggcattagactttgactctaacatgcgctggttcgaatccagctatcccaattctaaataatttcataacttatggcggtgtagccaagtggtaaggcagaggtctgcaaaaccttaatcgtcggttcaaatccgacctccgccttatcaaccgaataagttgattattttaaaatttaatattatggcggtgtggcggaattggcagacgcgtcagactcaaaatctggtgtccattacggacgtatcggttcgaccccgatcaccgctattattatgaagcgatccaattattggatcgcttttttttataataaaatgttagcattttattatataaattgcacatgaatacaggaatctttataatgctacatatggaggtactcaaatgaatattggtctttataccgatacatattttccccagataagtggcgtagctacttcaattaaaacgttaaaagaagcgttggaaaagcaggggcataatgtatttatttttactactactgatccgaacgtgaaaaaaggaactgtagaaccgaatgtatttcgttttagcagtattccttttgtctcatttaccgatcggcgaatagcatttagaggactatttgaagcaaccaaagtagctaaagaagtcaatcttgatatagttcatactcaaactgaatttgcattaggtactattggcaaatatgtagctcatcaattagatattcctgctatccacacttaccatacgatgtatgaagattacttgcactatattttaaatgggcatttgcttcgtccatatcatgttagacaatttgttaaaagctatttgaaaaatatggatggatgtattgctcctagtggccgagttgaagaattattacggcgctatggcgttcaaataccaattagggtgattcctactggagtagatttgcagggcatgaacaacgatattcaacgtgatgtgcggcaagaacttggaattgatcaagatgcgcctgtaattttaaccttaagtagaattgcagccgaaaaaaagattaatcatattttgaacgtaatgcctgaaattattgatgaatttcctaatgtgaaatttgttatcgcaggtgatggccctgatgttgatgtgttaaaggatcaggtagagcgattaacactagagaattacgttatttttgtcggtaatgtagagcatggcgatgttggtaattattatcgaatggctgatctttttgtttcagctagtgatacagaaacacaggggttgacttatattgaggctctagctgcaggtacgccatgtgtggtttatgacacagactataccgaaaacatttttgatcaagatatttttgggcagacatttactacacaacaagaaatgttagaagagattattactttgcttaagcaagggacgaaaagaatcccgcaggaacttttgcaaaataaattacagaagatttcagctgatcaatttgctaaaaatgtgtctgatttttatcagtatgcaattgatcactatcaacctaagcatgatgaggagactaaaaagaggaactaaatgattagaattaatatgttctcgcaagctgattctgttaaaggacagggtgtaggttcagcttataatgaattgattaaacttcttaggacgcacttagtagacgaattttatgtaacgattaacaaatatggcaatagcgatttaacgcattatcacacgattaatccaacctattacgcaaatagtttttcaccagcacgtggcaggaagattggctatgttcactttttaccagatacattagaaggctcaattaagttgccaggcgtagctaaaaaagttttttatcaatatgtaattgatttttataaacgcatggatcaaattgttgtagttaatccaatctttattgataagttggttaactatggaattgatcggaacaaggttagatatattcctaattttgtttcaaaaacagaattttatgaagaatcattggccagcaaaaacgcatttcgtcatgaattaggaattccacttgataaatttgttgtttttggtgatggtcaagtacaggaacgcaaggggatcgatgactttgttaagatggcacaagctaatcctgatattcaatttatctgggcaggcggtttttcgtttggcaaaatcactgatggctatgatcattacaaagaaatggttgacaatccacctaagaatatgacgtttgcgggaattgtagagcgagagaagttagttaagtatttaaatattgcagacttatttgttcttccatcatatgatgaattgttcccaatgtcagttttggaagcattcagttgtggaacaccagtattattgcgtgaccttgatctttataaggcaattatcgatggctattatctaagcgggaaagattttggcgaaatgaatcaagtattgcaaaaagtagttgccaatccacaaactttgcagaaatacagcgaattatcgcgtaaggcaagtcaacagtattcagaagatcatttagctaaaatttgggacgaattttatcatgagcaatatgaattaggaaaagagctaggtcaaatacattaatgaataaaaaacatttgtggggcattctggttgttttagcaatcagtgcctttgtgctatatgcagatttaaaagctacaccgatatcggaaatattacgggcagctcatggcctgaatatttttgcattaatcatggtttttgctttaatgcttttgtcctatgtatgtgaagccggtatcttagctactttagctcatcgaaagaaagagcctaaaaggtcagcttggtcgtttttgcgaattccaattattcaagctctatttaatgcaattacaccaatgtccacgggtggacaaccatcacagctagccgcaatgattcaaatgggcatggaaggtggccgttccacctcaattttgctgatgaaatttattatttatcagatcgttgttttgtttgcctatgtatttacaattatttttggctttcacatggtaatgactaagttcgctggtttagcaatttttattgcaattggctttttgattcatgttagttcaattatctttttgctggcaattatgtttgcttatcgttttactaaaaaggcaactaattggttaatggacttgttggcaaaaatgatgaaaaaggaacgagttgagaagtggcgtaaggctactttagaaaagattgatactttttatgcagagagtcagaaactaaaaaaagaaaagaagaaattatttgttgcctcgcttttaacagtattgcagctacttttcttttactccgttccatttatggtattaacagcgctaaatgtaccttgttcttggtatcaagttacgcaaatgaatataatgattatcatgtttatggcgatcattcctattccaggtgcgtcaggaggggcagaatatagtttccaaacgttattctccaccttcatttcttcacatggtgcgttaattttggctatgtttatttggcgcttttcaacatattttttcggtatgcttctcggcatcttaggctggatttttgaaactgtcaaatcttttgtgtaaatagatctttctcgtaaattgattttttaattatttatttaatcaaagtaggattctaaggtgtcctgaacctgaccaaagcctttatgaattcgattgaaataacggtcattgtagctcattgcctgaatgccaataaaagcatcaagcgactgttcagttggaaactctgccttaggcttagctttgcgcttgatcacattgttaaatgattcaatcatgttagtcgaataaattgaagctctgatctgcttgggatagttataaaagaccagcagatctggttctatgtctttcaagcttctgataacatggctgtaaaccttgccccatttggtatagaagtcatgcaggacagctgtggcttcttctttgtttgtctgttgatgcacctgtttgaattcgttcatgatcttttcacgatcgtcgacgcgtactttagcgcagatattgcgcatgacatgaaccaaacagcgttgaaaatgagctttaggataagtcctggccaaggctgttttcatgccaacaacaccatcagaaagaaaaagctcaacttgctttaagcctcgggatttcatgttttgaagcatatctgtccagacttcaatgttctcgctaggcgcaatgcagtagtcaatgacctccttgtgcccattaggcttgatgccaatggcaatatagactgcttcacgctcaaatgtttctcggcgcaaaggaaggtatgtcgcatccaaatagacgcagaaaaacttgtcgcttagcttgcgtttgtggtaagcctcaacctttggaatcatctgcttggaaatatttgatacctgagctggactgtaatggctgccatacatcttttcaattagatcggctatttccctggtggtcacgcccttggagtaaagcttgataatcatgctttccaagatatccgagtgctgcttgtagtcaggcagcgtgtgctgatgaaattgaccgttgcgatcccggggcacttgcacttcaattgggccaaattgcgtatcaactttgcggaaataagcaccatttctagagttgccagtattccagccatttctggcatagggatcatagcccagaaaggcagtcaattcagcttctaacaagttattaacagcctgttgtagctctttgcgcaataaatcatttattttgtctggattgaatagagcttgagcaaaatctttggtaaaatcattcatgaaggagttcttctttctgtatgtgtttttttgttcaaaccaatcatacgagaaaggaactcctttttctaatgtttaaagaaataaatttaaggaatcattcatccttacacaaactattttacagtctcggatttttaagccgaaaaagataaaaagcacaaaaaatgattaatttttattaaaacaacggtgtcttactaaatttcgtagtaagataaattaccgtaatgagaggagcagaagcgcgtggaacacactaaatctttttttaggtggctgacacagactaagttaggcttttttacgattgttttagtcttgttttggcttaaaacttattttatctatttaactaagtttaatttaggagcagttggtccaatgcagcaatttttattgctgattaatccgattccttcagggatgcttttgctgggaattgggctattttttaaaggacgtaaatcctattggattattttagttatcgattttttgctaacactgtggttatttgccaatattttatattatcgcgaattttcaaactttttgtcattttcaattattaagacatcaggctcgacttccgataatttgggtaaaagtattgcaggaattacactagctagcgattttttagcttttgctgatattgctgtaattatcgtgttattggcgaccaaagtaattaagatggatgttcgtccactgaagctaaaagttaatttgttaattgaggctttggctgtcagcttaatgggactgaatttattgatggcccaaaatgatcgttctggacttttgacgagaacttttgataataattacatcgtcaaatatctgggaatcaatgaatacgctatttatgatggctataagacagcacaaactagtgcacagatggccaaagctaatgtttctgatttgaagtctgttagaaactatttaaaagaaaattacgttaaacctaatcccgcttacaccggcgtggctaaaggaaaaaatgtgttaatcatccatttggaaagttttcaacaatttctgattggctacaaatggaaaggtaaagaggtaacgccaaatctgaataagatttatcatcaaaaagagaccattagttttgataatttctttaatcaagtaggacaaggcaagacttctgatgccgaaatgatgcttgaaaattctttatacggactacaatcaggtagtgcaatgtctacgtatggtacttctaatacttttgaaagtgctccagccattttgcatcaacaagctggttatactactgctgtaatgcatggtggtgctggctccttctggaatagaaataatgcttataagtcatttggctaccaatactttatgccactgtctttctatcagaacaaaccaagctactatatcggatatggcttaaaagataaaattttctttgatcagtcaatcaagtacattgagcgtttaccacaaccattttatttaaagatgattactgtaacgaaccactatccgtataatatcgataaaaagaatcagacgattgataaaacgaatactggggatgaaacagttgatggttatgtgcagaccgcgcattatttagaccaagcaattggtgaatttatgcgttggatgaagaagacgggcctagataagaagacactagtagtattttatggtgatcactatgggatttcaggtaatcaccataaggctagtgcagaattgcttaagaaagattcgtttaatgactttgataatttgcagttccagcgagttcctttgatgttccatatgaaaggactaaagggtggcattaatcacacctacggcggtgaaatcgatgttttaccaaccttactgaacttgctggggatcaaagacaaagatacgatccaatttggctatgacttgctaagcaaaaatgcaccgcaaattgtagcacaaagaaatggtgactttatcactccggaatattctaaggtgggtagcgattattatgacaccaagacgggcgaaaggatcaaacctaataagaaattaaaagaaaaattaactgcaatttctaacaccgtaactacacagctgtctttgtcagatcgtgtaattaatggcaatctgctccgattctataaaccaaaagggtttactagagtcaagccgaaggattacgactataacaaggcgccatctttaaaacgtttgtttgatgatccaagcaaaacttcactgtggtatcaaaatcatcgtaaaacgacgcaaaaagatttcaagacagatgcgcctgaactaaaaaaataactgcaaaaactagtaatttgtgataaacttggtaagtaaatcgtatgtgtgtattggaggcagcgcattgtataatttagttatgacgctactaatcattgtttcaatcttaattgtcattgcaacaatgatgcagccacaaaaacaacaagatgcattgaacgccttatctggcggtgccgtttttagtgggcaaaccaaaaaacgtggttttgaagcatttatggaaaaagtaacctcagttttattggtactctttttcgtctttgctattatcttagcttatatgtcttcaaaataaattttgtacctcccgatcaaaatatgatggggaggctttttttattaaatttaaagatcggagaataactgcatggcacaaaacgaaaaaattttggccggcgttttagaaatttttcgccataatccacaaaaacaatttcgtgtagatcaaattgaacgtgaagcacgtcgtgatagattaggtaattttactgaattaattaaggctctttcttttttagagcacgataaaaagattattacagatggcaaaggacaataccaattagctcaagaaaatactgaagttgaaggtgaatttagagctaatgataaaggctttggctttgttagattagatgatgaaaatgcggacgacgtctttgttgccgcagattataccaagtatgccgttaatggtgaccgagtaaaagtaaagatcactgctggtggtaatccttggaatggtaagggaccagaaggtcaagttgaagagatccttgaacatggtttggaaacgttagttggtgaatttcatccgctaactgatgaacaaagaaaaaacagtcattttatcggctatgctttgagtaacgataaaaagttgcataaataccgggtttatttgtctgaaaatggcttgatccctcaaatgggcgatatggttaaggtctcaattaaggattatccagatgaggaaaatcctgagtcaatgactggtgcagtagtcaacattattggtaataaaaatgaccctggtgttgacattatgtcaattgtggcagcacatgatgtaagaactgaatggcctgaagatgcaatggcgcaagctaatgctattcctgatcatgttactgaagaggaaaaaaagggtagagtagatattactgaccaacctgcagtcactatcgatggggatgattctaaggactttgacgatgctgtagttttatggaaaaagcctaacggcaattatcaccttggtgttcacattgcggacgtttctcactatgtgacagaaaatacgccgttgaacgaagaggcatttgctcgtggcaacagtacttacttagttgatcgggtaattccaatgctgccatttagactttctaatggaatttgttccttaaatgaaggcgtggaccggcttgttttgtcatgtgacatggaaattacgccagaaggtaaaagagtaggttataaaatttatccttctgttatgcgctcacatggtcgaatgacctacaacaaggttaacaaaactcttaagggcgaaatgaatggtttagaggataagtatgttaaactccgaccaatgcttgaagaaatggcagatttgcatgctgctttgtataaacaacgtcatcaacgtggtgctattgactttgaagaaccagaagcaaaaattattgttgatgatcaaggcaagccaacagatattgttttgcatgaacgtggtactgccgaaaagatgatcgaatcatttatgttaatggctaatgaaaccgtggccgaagatttcttcaaaaagcatgttccattcttgtaccgtgttcacgaaacaccagatgccgaaagaatcaagactttctttgaattttgtagcgcatttggcttgaatattcatgcggatccaaataacgttaagccaattgatttacaaaaagtagtttctaaaactacagatactccagaggaagctgtagtacaaatgatgatgctacgtagcttaaagcaagcgcattattcagaagaagcactgggacactttggcttagctgcagaatactatactcactttacttcaccaattagacgttattctgacttgatggtgcaccggatgatccatgcatatcaagaccaggggactaatgaagaagtgcaaaagcattttgctagttacttgccagatgttgcagaacaaacttcaacgcaagaaagacgttcaattgatactgaacgtgaagtaaatgacttgaagatgacagaatatatggccgatcaagtggggcaacactttgacgcggtagtatcttcggtaactagttttgggatgtttattcaattaccaaatacgattgagggattaatccatatttcgaatttgactgatgatttttacagttttaatgaaaaagcattgacgctaactggtcgaggtactcataagcaatataaggtagggatgccaattaaggtaaccttgattaatgctaacgttgaacaacatcagttagactttgaaatatatgatcctaatgcgcctaagcataagcataacgatcgcggaatgaataatcgtcgtcgtggaaaccgtggcttccgcaataatcatggacgccgtggtggtcagtttaataatcacagcgatcatggccgtggccgaggtaatggaaaccgtggaggtcggagaaattttaaacattagggattgatcttaatgaaaaaagaaaaagaagataatttaattgcacaaaataaaaaagcacgacacgactattttattaaggaaacattggaagcaggaattgctttaactggaaccgaaattaagtctgtacgagctagaagaatcaacttgcgggatggttatgtgcagatcgtcaacggacaagcctggctagaaaatgttcatattagtgaatataagcaaggcaatcggtacaatcatgagccactacgtagtcggcgccttcttttgcataaaaaagaaattgcacgtttggccaaagcacaatcagagcgtggtattgcaattattccacttaaagtgtatttaaaacatggctttgccaaggtattgattggtgttggccaaggtaaaaaggaatatgacaaacggcaaacaattaaagaaagagaccagaagcgcgatattcgacgcaagtatggtgtctaagatgagtctgagaagaatctcagactttttttgttgaaaaattttaaaaagttttttttattttcacaaagtaatgttcgaacaatttgaagaatgcagagaaaatcaagctaaatatttttttaattattatagaggcgaataatagtattaagatacgtttgatattgaaatattcatattaaaaatccgaacgaagagcaagacttgccaaagcgaagaaaataaggtaaattaataaagtcgcttcgagagatgcgacgagagcttaaaaacagacatgtaaggaaagaaaacaaataaaaagaaaaaagtacttgcaaagaagtaaataagctggtaatatatttaaatgtcgtcaggtgaaagcagaaaaagcttgagcaagacgaaaaaaacaaatcaaaaaagttcttgacaaagaaatgatggtttgataaaatataaaagctgtctgctttgcaaaaaagcaagacagaggtagtactttgaaaactgaacaaagtttcgctaaaagtgtgcgggtgtaaaaacccaaacaagaagcgaagtcaattcgcaagcaataaatttgagacaaagatcttaaataaggaatgagcaatcattcaaactttttaaaatgagagtttgatcctggctcaggacgaacgctggcggcgtgcctaatacatgcaagtcgagcgagcggaactaacagatttacttcggtaatgacgttaggaaagcgagcggcggatgggtgagtaacacgtggggaacctgccccatagtctgggataccacttggaaacaggtgctaataccggataagaaagcagatcgcatgatcagcttttaaaaggcggcgtaagctgtcgctatgggatggccccgcggtgcattagctagttggtaaggtaaaggcttaccaaggcgatgatgcatagccgagttgagagactgatcggccacattgggactgagacacggcccaaactcctacgggaggcagcagtagggaatcttccacaatggacgcaagtctgatggagcaacgccgcgtgagtgaagaaggttttcggatcgtaaagctctgttgttggtgaagaaggatagaggtagtaactggcctttatttgacggtaatcaaccagaaagtcacggctaactacgtgccagcagccgcggtaatacgtaggtggcaagcgttgtccgaatttattgggcgtaaagcgagcgcaggcggaagaataagtctgatgtgaaagccctcggcttaaccgaggaactgcatcggaaactgtttttcttgagtgcagaagaggagagtggaactccatgtgtagcggtggaatgcgtagatatatggaagaacaccagtggcgaaggcggctctctggtctgcaactgacgctgaggctcgaaagcatgggtagcgaacaggattagataccctggtagtccatgccgtaaacgatgagtgctaagtgttgggaggtttccgcctctcagtgctgcagctaacgcattaagcactccgcctggggagtacgaccgcaaggttgaaactcaaaggaattgacgggggcccgcacaagcggtggagcatgtggtttaattcgaagcaacgcgaagaaccttaccaggtcttgacatctagtgccatttgtagagatacaaagttcccttcggggacgctaagacaggtggtgcatggctgtcgtcagctcgtgtcgtgagatgttgggttaagtcccgcaacgagcgcaacccttgttattagttgccagcattaagttgggcactctaatgagactgccggtgacaaaccggaggaaggtggggatgacgtcaagtcatcatgccccttatgacctgggctacacacgtgctacaatgggcagtacaacgagaagcgagcctgcgaaggcaagcggatctctgaaagctgttctcagttcggactgcagtctgcaactcgactgcacgaagctggaatcgctagtaatcgcggatcagcacgccgcggtgaatacgttcccgggccttgtacacaccgcccgtcacaccatgggagtctgcaatgcccaaagccggtggcctaaccttcgggaaggagccgtctaaggcagggcagatgactggggtgaagtcgtaacaaggtagccgtaggagaacctgcggctggatcacctcctttctaaggaagcgaaggatatggagagcaggaatgctaagagaagtatccagagcaagcggaagcacactgagaaactttgtttagttttgagggtagtacctcaaaaagagctagtacattgaaaactgaatataatccaagcaaaaaaccgagacaatcaaagagaacagattgtagagcgaccgagaagagaattcttgagtaaggtcaagtagaaaagggcgcacggtgaatgcctaggcactaacagccgaagaaggacgtgacgaactacgaaaagcttcggggagcggtaagtacgcagtgatccggagatatccgaatgggggaacccaatgcagagatgcaatattgattagtgaatagatagctaatcaaaggaagacgcagtgaactgaaacatctaagtagctgcaggaagagaaagaaagatcgatttccttagtagcggcgagcgaagaggaaagagcccaaaccaagtgatttatcatttggggttgtaggactgcgacgtggcagtgtaagagatagttgaattatctgggaaggtaagccagagagggtgagagccccgtaagcgaaatctcaagcacgcctagcagaatcctgagtaggccgggacacgaggaatcccggttgaaaccgcgaggaccatctcgcaaggctaaatactagttagtgaccgatagtgaaccagtaccgtgagggaaaggtgaaaagaaccccggaaggggagtgaaaaagaacctgaaaccgtgtgtctacaagtagtcaaagcacattaaagtgcaatggcgtgccttttgtagaatgaaccggcgagttacgttatctagcgaggttaagtcagaaaagacggagccggagcgaaagcgagtcttaatagggcgaaaagttaggtgacgtagacccgaaaccaagtgacctacccatgaccaggctgaaggtgtggtaaaacgcactggagggccgaacccacgtaagttaaaaattgcggggatgagttgtgggtagcggtgaaattccaaacgaacttggagatagctggttctctccgaaatagctttagggctagcctcgtggagaggataatggaggtagagctctgtttggactaggggcccgtcaggggttactgaatccagataaactacgaattccagatatccatacacgggagtcagactgcgagtgataagatccgtagtcgaaagggaaacagcccagatcaccagttaaggtcccgaaatctatgctaagtggaaaaggatgtggagttgcgtagacaactaggacgttggctcagaagcagccatcattcaaagagtgcgtaatagctcactagtcgagtggcgctgcgccgaaaatttaccggggctaagcatagtaccgaaactgtggatgtgttttaaagagcacgtggtaggagagcgttctaagagcggagaagttgaatcgagaggatcaatggagcgcttagaagtgagaatgccggtatgagtagcgaaagataggtgagaatcctatccgccgaaagactaaggtttcctggggcaggctcgtccgcccagggtaagtcgggacctaaggcaaggccgagaggcgtagtcgatggataacaggtagagattcctgtactgtgtcaaatcgttaagagcgaaggagggacgcaggaggtgaagcacgcatcgcgatggaacgatgttcaagcaacaagtgcggttaagagtcaaatgcttctaaccagcaacacgagttgtgaagaggagtgaattaaaagtagcgaaggtgtggtaatcacactgccaagaaaagcttctagccagagatgacatacccgtaccgcaaaccgacacaggtagtcgagtggagaacactaaggtgagcgagagaactctcgttaaggaactcggcaaaatgaccccgtaacttcggaagaaggggtgctagccaagagattggttagccgcagtgaataggcccaaacaactgtttatcaaaaacacaggtctctgcaaaatcgtaagatgacgtatagaggctgacacctgcccggtgctggaaggttaagaggagagcttagcgtaagcgaaggtttgaattgaagccccagtaaacggcggccgtaactataacggtcctaaggtagcgaaattccttgtcgggtaagttccgacctgcacgaaaggtgtaatgatttgggcactgtctcaacgagagactcggtgaaattataatacccgtgaagatgcgggttacccgcgacaggacggaaagaccccatggagctttactgtagcttgatattgagtatcttttaaacatgtacaggataggtaggagccagagaagataggacgctagtcttattggaggcaatgttgggatactacccttgtttgaaggatgctctaacctcgacctgtaagccaggccagggacagtgtcaggtgggcagtttgactggggcggtcgcctcctaaagtgtaacggaggcgctcaaaggttccctcagaatggttggaaatcattcgcagagtgtaaaggtataagggagcttgactgcgagagagacaactcgagcaggtaggaaactaggacttagtgatctggtggtaccggatggaagggccatcactcaacggataaaagctaccctggggataacaggcttatctcccccaagagttcacatcgacggggaggtttggcacctcgatgtcggctcgtcgcatcctggggctgaagtcggtcccaagggttgggctgttcgcccattaaagcggcacgcgagctgggttcagaacgtcgtgagacagttcggtccctatccgtcgtgggcgtaggaaatttgagaggagctgtccttagtacgagaggaccgggatggacgcaccgctggtgtaccagttgttccgccaggagcatcgctgggtagctatgtgcggaaaggataagcgctgaaagcatctaagtgcgaagcccccctcaagatgagatttcctttgcgtaagcagtaagacacctcagagacgatgaggtagataggctgggagtggaagtcctgtgaaggatggagcggaccagtactaatcagtcgaggacttgaccaaagcgaagcaaactggaaggttttttgcgagaaggattatgtttagttttgagtgtaaaagctcaaaagagtacggtggcgaaagcaagaaggatacacctgttcccatgccgaacacagaagttaagcttcttaacgccgaaagtagttggtgggcaactgcctgcgaggaaaggaagctgccgtgctcttttttaatattccggcttagctcagttggtagagcgcttgactgttaatcaagatgtcgtcagttcgagtctgacagccggagtactttgtatggaatgttgtccgagcggcttaaggagcatgattggaaatcatgtatacgggtttatacctgtatcgagggttcaaatccctcacattccgtaattataagctcgtaagtgttgatcttacgggctttttgatatattgcggtctctaaaaggtctccaacctcccaaaaacggctaaatttcatctagaattgtaactatttgtttatccgatttttgttttaattcgtccagcatgtaagcatatgtattggctgtaatgctcatattggcgtgtcctaaacgtttacttattgaataaaggtcaacacccttaaagagtaacatagccacgtgagtatgccgtaagctatgaaagtgaaaaccttttttattaatattaagctttttaaaatatttgcgcaacactttattaacggcacttgaagttggaatggttccatctttgccaataaataatctttcgtgaccgttctgttttagttgactaagaatattgagtaaatgctgatctactttaataacgcgagtagaggaacggttcttagtttctttgtcaatttcatctgaatcataatcaataattttgttattatcataattccatgattttgaaatatggatagtgcagtttttaaaatcgatgtcgtgccaagttagtactctgatctctcccgggcgcatgccagtataaattatagtcaaaagcatatatctactgatgtaagcaggggtaattccgtctaaaagcgattttttgagctgctgaacttggctgaaatttagataatctatttttctactgcgttcattattccaagtcaaattaattctttcggtaaaattaattcttattagtccctcgcttatagcgtctttaacgctagttcgaatacttccattagtcttatataccgtaccttttacgtgcgtttttccatacttattcataaaatcttgatatttgtgtctagtaatttttgaaattttagttttgccaaaatactcagacaaattatcataaataactttatatctattcttagtggtgtttgaagtgccaggcgttttataggtctcataccagtccttaaagtattcagcaaaaattggatcttggttagatatttgattgtcgtcttttgcaacttccatctcattagcccattttctggcggctgttttggtcaaaaaaccttgcttgcttttaaatctacgctttccgcgaacatcgtaccaggaaactttagcgcgccacgtgttgccccttttttgtaagtaagccataatttaatcctctccttattaataaagcccgtttactcagttgagtaggcgggctatttttattctccttccttgtttccatcagtatcccaaattccgtatccatttccatcagtatcaaaaaatacaatatctgctttagatatattgccaggatatggcgctaaacgattataagcatcgctaatatcgtcaacaatggatttttgaattaaagttcgttcatctttagtgtcctgcttaataaaactttttgtgaaagtaacttcaatatgccccgatcccatgacattaatgctatcaatagtatcgccaccatatttttcagaatctaaagagctcaattgtttctttaaagtagtaagatgttctttttgaacttgtttgcgcagggatttattgctaggtactccagtttttttcgatgatttagaactgctactagattttttagaattaaattctttatcttgctttttagctattttatccattttcttttcaaattccttttcggattttgactttttcttagttttatgagacgtaggctttgattcggttgtttgagctttaggttcggttagcccacttacaactgccatacaaaagaaaatagcaatagaggaaatgattgtgatggttccatatttagaatctttaatatttaatttctttgctcggctgtgccgatatattgcaaaaacaattggcaatataaaagataaaaatattaataatacgtgcatttaaatactcctattcttcaaatctatatctatttaattcttcctgaacctgtaaataatcttgtgtcccaatacttttagcgatgtttagccagttagcatcttgaatttcatttcctaatgcaaaatactgcttaactttttcgtgaatcatgaaaacatttgctccgtgttcactgcaggaatgagcaccatcatccgtttgatagtcgcctaaaacatcgccatcatttttagcatgtccgatttcatgaagaataacgttttctacttcgttgtcatcaagcttagagttaactactaccacatcgggcttgccatctttgccatgaactattaagccagggcaatgtaaaggggcaaatgcaagctttaatttatattttttgagtaatttactaacattggtatccataaataaacaccttatttttcgctgtaaatccttttcaatatacctctaactaattccctgtcatgttcgtctaatggcttgccatcaaaagagcgggcatcatctagcatgtcatctaaatcatcatttacttctttatcgtttggtgctggattatcaactttaccagctaagtagtccacactggtatcaagtattttagccagtttaactaaagtgtccatgtctggatcattgtacccgtactcccaattagcgtatctagggaggctaaccccaatcatgttagccatttgtgttttgctgtaattgtgatcttccctaagattagacaaacgttcattaaacttcattttgctacctccttatttaacctacatatttattttagctttgatacagtaaatatgtagaaaaataaagaatttctttacaaaagtatttacattatataaattctgtagtagtataaagcatgtaaagagttacagaaaaactttataaaggagatgagcgaatgacacaggttactgttgccaatgctaatgaaattttaaagcaatatttaaagtctcacggtattacacaaaagtttgtagccgataagatgggggttaatcgacaaacctttaacgcttacgttaatgggctaatcaggtttgatgccgattttgcgttaggggtttcagaagttctcggtatttctccttcgatttttttaaaagaaaaatacagaaaatctgtataaggggggcgagttaaatggaccaattaatcaatacttcaattttgaagaagttagttaagcagattgttaatgaatcaatcaaagacaatcaagacgacttaacgggtaaaacttggagcattgatgaatttagaaaaatctgttgtcaaggtaagggtaagagttgggttagaactttcatctttgacgaatacccggaagttaacgtcaagcgtggcggatttgtagtaaatcctcgcaagacagccgagggtagcagaacaatcatctttgcaaaagaagcttgtgaatggatgcagaagcaccaacatgaaattgattggaacgcgaaagtcccagtttaggaggttaaaaaatgacagtagttacagataaaaaagtttacgagattgcaaaggaatttggcgtgtttgacgacaacccggatcaattcaacattaccagcgatgaagattatagattttacctctggctagacaatggttcattagtggcttttgaacctggttataaaggtttacaagacttattaagtgaagtgatggttaggttctttgaaaaccgtaaaaagtcggaaaagacaacagaactagtaaacgaagccagaaggtcagtgattgattactgtattgaaaacggtaagcaagttcaaagggagaaagcaaaatgagcgaatacgaaagagagtatggcaaaactaagttagatcacgttttaagtcatatgactaaagcgtttggaaagttcttagaattcttagcaattctatttttaccatttgcaatcgttgaacaggtttgcatttacggtacaacgcactccgatcaaatcatttcactattgttagttctattaattctctttacggctttaggcgtacgtgccgtaaagaagcttagaaagtaggtgaaacacatgagtaattcagcaattttcaaagttcgtttaaagcgaacaagaaagaacaagaacttaacacaagagcaattggcggaagccgtagggcttggagttagaactattggacggtatgagcaaggttcaagttttcctaacaagcgagtacttcatgaacttgcgaaagttttaaaagttaagactgactggttatcagcaacgaattaaggagactaaaaagtgagacaagacggttatgacattttgcaaaaggcagttaaggaaattattcaaaacgaaaattcgtttgcaattcttcaaatcccaggcgacaccttgcaagtaccactaaaatccaaaaatggattcttgggcattgaatgccaaacagcaactatggcgtcgctgcctcaacaaatgattctagcgattcaattttacgagcgggtaaagaaagaagcagatgaaaacgggctatcgacggattttaaagctcttaaaaaaatgattaaagagcagttggaggactaatgaagttatggaacaaatttataaacgcgctattccaagtagacaaaaggatcgacttacagacgtccaatgcggcgttcttgctaatagtaatgctatcagcactgctagtggggatttcgctagattgaccaaagaagttaaaaagtttcttggattggcaaagcaaaaagccctctactgctagagacagtaaagggtgttaaacaaagaaaaaatatttcaataaggagattataccacatggaaacgttaaatgcagaacaagtaaaagaagcaaagtacttgtatgaaaatcaagcgttaaaagatctatcgctagaagaaccgggcgcaattcttttctgggacggtgaagagcaagcattaattactaaaaatgctgatgactttgacaacgcatataaagagccaatggacttcttcatgaaaaaggtaaaccaagactataaaggcgacttgagcaagtttgcaaaatcgcttggttacgggctaggcaaagcaagcttttcaatgggcgatttcttagccgattggaatgacttaaaccaagattcactaaaagaattgatctttgactactttgacggcgaagaactaggagatatttacgatggctaacaacgaactaatccaatttgacggtattgagtacccagtaagctataaaccagctgaaattattttcccaaagtatgaagagatgaaaggcaacatcttaaaagttcatgatgaattcgctgattggacagtaacgccgcaaaaccttaaatcttccaaagaagtaagaaagaatctcaacaagcttaaaagaactatcaattcacaaagaatttcgattactagtggaattcaaaagccagcaaagatgtttaaagcaaacattgatgacttgatagcgattattgacgaaacaactaaaaatatcgatttacagcttaaacagtacgatgacaagctgagacaagataagcatgatcaacatgtcaaatttattaaacaggcttgtaaagacgctggcgtagaccctagcaagattagatataacgccagctgggataacaaaacttatagcaaccctaaatttgaagctgaattatacgagcaagttgatattttacgcaaaaataagcagcaactcgaaactaataaacgaatcatcattcaaaaagccgatgaactaggaattccgttcgcacactacttcgatcaattgcaaagagaggtcccacttgatgagattcttaatgacatgcaggcggagaaagaagaattgattgcaattgctaaaaagcaaaaagaacaagccgacttggttaagcatggcgataaggcgattgaccctcaaacaggcgaagttaaggacaagacttatactttcagtctcgaatttcaaaacgttactaagtaccaagtcgatcaattgaacagcttcttaaaagactggggaattaaagcgaggagaattaaataatgactacaaaagaacaagggtttagtgatttttttgagccaaatcaagaattaattaagaattttgacatcaaaaagtataagaaaacgggcaatgaaccaaaactaaaaattcttacttatacgaatgagcagcagaatcgaaaagataaagcttcatgggctatgcatttagcaatgatcaagatggctattgtgcagccaaaaaagacacacgaagttgaagttcgaggaaccactcaaaacggcaagccttatcactacacttacaaatatgctgatttagctgatgttgacaagtcaattatggatgctattaaaaaaactaagcaagatgatgggccgttattgacttactacttcgatattgacaacggtgctgagggcgtaactgttgagactgtaattgttgatgcggcaacgggttacagtgtacgaactaataaggtttggttcaaaaatgttaatgttggtaacgcccaggcaacagcaagcctgatcagttatggaaaaagatattcgctttcagctgcgtttgggattgcaagcgaagatgacgacgatgcgcaagcccagaaaatgaatcaatcacaagtagttgatgaaaatgctatcaaaataatttttgaggattacgttaataatcactcaattaaggctaaaaactggattaagggtaagcatgataaggcaacaggtgactatatcagacagttgcttggtgattacgagcttaaccatcatcttgacaaagctaagcaaaaagcaattgactgccgaaaagaaaaagaccagcaggttaaagaagcggtcaaaaagataaagaaacctaaatcggaggacgaggtaatcaaggatatcgtggataaacctaaaacggacccgttccctgataaaaaagaagacgctccaatgagtgaagagcaacaaagcttatttgatgacattttaggtgattaaaatggctaagaaaagaaaaactagcgagaacaatcgcaagtttaaaggagtttggatacctgctgattactggctggatgagaatttaagcattatggaagtagtcatcttaactgaaattgacagtcttgatggtgagaatggttgctttgcaagtaataaacattttgccagttttataggaatgacaccggcttatgtatcaaaaataatcaagcacctaaaggaaaagggctatataagtgttaattacaaaaccgaaaatcgggttaccacaagatcaatcaaaataattagaggtactaactctagtaaagggggtattaacaatagtttagggagtattaactctagtaaacagggtattaacaatagtttagaccctattaactatagtgtaccaagtaatacatctagtaatacatctaatagtaatacagatagtaattcttcttctggacgaagaagagaagaagacccagaacgtgaacaaatttataaacaatttttccaactggcaaggatgtacgacaagatgaagcaaaaggctactaatccaacctatgacgaaattaagcaactaagaagcttgctttaccggtgcaacattgacaccttaaaagccgtcgttagcaagtttgacatgaaaatgcaatggaacatggttaatgatccattcgcctatctgctaaaaatgcttcgtgatgggttagcaattgacaaggattctgaaaggtggggtaagtgatgaacaggttaagagaattaagaaaaaatcatggcttaacgctgaaagaattgggcaaaaaagtaagtatgcacgataatactttgagccaatacgagacgggaaaacgaaatcctagtcttaaaacttggcaacagctagccgacttctacggtgtatccgtttcttacttgcaaggcagatatgaccacctaaccaaaaaagaagccttgcaaacaattcatgaaattatgaccatttgcggtattagcaaagaagagttaaaggataggctgtaaaaaatgatttttgatttaaaaattggttgcgtagtaactccacgccaattatctgatgtcttccaatacgcctttatgagatggaagcttggtgttgactacattcccaatagtcgcctttatgcgattgatacgcggaacaacggaaaaatccaagttacgggtgatcggaaaatcgtttacttgggacttggtacttggaaagtaaaggactagaacaatgactcaaagaaattacaaagaaaaaaatgttcaagaaatgaacatggaagatttaatcaatacggtaagcgatgacttaagtcgctatgacaagcttaaaacgcttgaaggcgttaaaaaagaaatgtcggtcggtttgtttagcaacaacttatctgaaagagggctaaaggcttatatcagattgctagagcttgaattgcggttagcaactacaagggaaccgatctttcatgattcacgtggttttggcgattacctagccggcaaatatgcggaacctgatcacgaagaaatgcatttgatcagtttaagcaaccaaggacaaatcatttctgatgatttagtgggttcaggaacggtagagaattcagctatttcagtgcccctaatcgttaaaaccttatgccttaatggggccgctaacttcattgtggtacataatcatccaagcggttcaatgaagccctcaaaagctgatttaaagatgactgattcaattaaaaatttgtctgagctaattaaagtacgcatgttagaccattttatcgttggtaatggaaattacttttcatttgctgagcatggtttactaggagattaacatgaaattttatctaacaagtcaaaagtacgcaaacagcaaccctaatttaactgcttatgaaattgaccagattagtaaagcctacttagggaagcttagtaacgtttgcacagttgaggtttggctaccgtctaagatcaaaaagacaaaatatgcgggagatggtatctgccgcggcggatcaatcgttattaacattgcagatgtacccacttggcaattttttagaaaaatgttgggtaaagccttccttatggttgctttaatgcaaccagactatccaaaactagtaattacaaaaaatgaatacaaagtacaattttggcaattgtaagtttaaagcaagtaaatttagtgaattggataccaacccaagtcactacaagaacagtagctttacacataaccgccctagttctttgaacagctatacaaagggcgtagcaattacttacgtaaacggtcaaacctttaagactaaggatgtaactgtagaaagcatttacgaagctttagcagaaaataacaactggcttcggctaaaaaacggggggtgcattaatttgaaccacgtgacgcactttgaaccgtataaattctttgaccgccctagggacgaaatgccagcaccgtggacggttggacacgcaccaaaagtgagaaacgatcacaatgcctagtgttctgtttcgggtaaaaagtcttgacggtgatccgcttatcaagattgttcttaacgaaaaagaaaagtacgagttgtactggctttatcctttcaaaaaatgtgctttaggtgagtttgataatttcactgaagcggaggttgcgttaggtcagtattacgggtttgaaaatattgaagaggttaggagttaaaatgcgtaagtttgtagctattgaggttgggccacggtccagcatggagttagatgttgaaggtcgttggctggtacggtggggtgttcctatcacgattaggggatttaaattcttctttataccaatggcaaacccaaaaaacgtgagaattgaagcttattcgcttgatagtttgaaaacttttgataggtttcacatttcacatgaagtagcttggaaaggttgctcaacggaagaaggctttattcggacggtcatgccgtttataactcgaattgataagcgtttggataatttagatgacgatggctggaaaacggtattcagggatgaatacatttcagcaattgcgcaatgtggcgcaagaaacaaaaaagaagctaagttactagaagattttaagaaacggaaatagcgatgaatgacttaaacgacttactagaaaatactaagtggtctgatatggggctagataaccgaattcgcgagctgacgcatcaggcgaagcaaattgaaaagcatgacgtgctagcgcccgaagattggaatgaaatcgttgttatgacttacgaccttagccgcttagcccttgaagtaatggattacgcaattgaacaagaaaaaagaggtataggaggctaaatatggatcagccaaaattatttgatttaccttttgatgatgtaaataccggtgatcaattttactgcgaagctacgaacaccacatatacagttgtttggatgtttactggcttctttaacggagctcttttagtaagaactcatttagacaccaacttttcggaagtttgcgattatgcaaagcaaaaaagccataattctgcgatggaagaaatagctggaattctgcgggagcttgatcgacaggatcctttaaagcagataagaaagagaaagggttaagtaaatgaaaaaaattaaaatcgtatttctagcgtcaattatcgctgtaatgctgtccggctgtacgatgccgggatggtggaatagtgctatgacgaacactaacggtattgatacggggcattttaaggaggttgtggttatctattcggacaagagctctaagacctatagtgatgttagtgtgtatccctataacaatggtggtaatgattcgactggtgaaaagattgaaatccggcaaagaggaaaagttattgttttacctaatgacgcgcaagttgagttaagaaagaattaataaatatgaaagacgaaacagtaaagaaaattcagaaatcagtggaacgtgcggatgatatgacaattgcattagactatatcaaatctgcgatagtggttgactgtgccgaaagccttaccgcaaatgatggtcatgttttgactgatgaagaaatgcgagtagttaatgcgcgcttgcttatgaaagcactgaccatgcttgatgatcatgaaatgcatgaaatactttcgcgcttgaacaatgataaaaaacatgatgcacatactgaattgcttttaaaattgattgatcatgaattcgacaagctaaggcaagagcataaagacaatgattttttgaagaaggtgacacacaatgacgatgatgactagaaaactgatcacgtcagcggaccagctagttgacggcaagcaatatgcattagttcaaagggaattcactattaaggttacatttagcgaagtggtgcaccctgaacctcagccaggctattggactactgacgacatagcatgtgctcaatttattggcagaaaaggcataggctgcattgttggagaagaccgacaacggttatttgacggactaacagagataggggtgaaaatttatgaactgtaaaagattaaccggacatggacaagatgaaatgatgtttcattgtgataattgcggggaaaacgtatcaatagacacttacgatgttttaacggcagaagacaacttgcattgccctctttgtggcgcaagcgccggtcatttagctgtctatatgtttgatgaaaagaagctaagagaggattaaagggatgaaaattcttgatccagcatgtggttcaaagatgttttggtttgataagcatgagccacatactacttacacagatatacgtgatgaaatccttactgctaaggatcgtaaatacactaggaaaatagaaatccaaccggatcttgttgctgactttactaagttgccatttcgggatatggaatttcatttaattgtttttgatccgccacatctcaatgtagctggcaaaaatagctggttagcgaaaaaatacggcaggctagataaagacaactggcaagatgaattgagagcaggcttcaaagaattgtggtgtgttcttgcactagatggggtacttcttgttaagtggtcagataaccagatcccttttaaagacgttttgaaacttgttggccacgatccaattttaggggacaagcgagggcatacaagatggtttgtattcattaaacctaatgacacttatacatcaatgtctagtgtactaagtgataaagagctgaaagagcgggggataagccatgattgatgtaatcaaagtcctgctggtcatgttcatcgtcaccgcgatggtgtggctggcggcatatacggtattgactgcggtcaacgttttaaaagattggtggcgtagcaaatgaagcaagaagatgaaagtaaacttggaaaggttaatgaacttttgggtgaggtctatgggctatgttttgggaagatcactaatgctgagtacgaagttacgaatagctatacgcgtgctggaaaaattattttattcgttgattctgttaaaagccgaccaatgactttggatcgagcatttgaagcactgcgcaggaatttgcaagcaattaaaaatagcgttacttgtactaaaaatggagcaaacatagctattttttacagtgacacgaggatagcaacgattatagaagcttttgatactaaaagtaatgaaaaaactctggctgttgatttggaaaaagaaattctatcagctgatatcgttgccaaaattgtaaatgctatcagttcgtataaagaactgtggttacaagcaaaggaggacaaaaatggcagacaaaagagtgatgaagcgtaaagaaggctgctatctttgtgggacgttgaacgcttatcacaatggacctggtttaagtccaacaagaaatttttcaagaataaaaaggcctcatatcggtcttaatgaatttgatggcaagtggtatttgatagctgatggggtaccttatccagtaaagcatttaattgcgggcgaaagcttgatgaaaacaccaaatttacagttacggatggactgcaatatttttaggaggtttagaaatgaacgataaagaaaagaaactaacagaagcactaaaagagtattttggcagggatgttggcgatgttgagggtgagcctaacttcatggattattctacgaaattaccgggtttggtgcatcctataaagcgtatcgtgatcactacggtaccttacaaaccaacttttgaagaaagacgtaaagagttggttgaccagctagataaggatttgaaagaaattgatggcgactttaatgtgaaaattaaaggggataggatttacatttatctttgtgcagttcgcttatatgaattatatggcgaggataacatggctatttatagcgtttatttaaaagtggagaaaatggccaaggctatggaggctatttcaggcttttcatggaatttgaggcaactaaaggagcaataaaaaaatgactagtgaatcagtaacttacttaaaaaatatcttagctgtccaaaatattagcggtcttattacttctgagggctatgacttaatcgatcaagaaaagttagtaactaatcacaatcaggctaagattttagctcgattggttaaagaggtaggtactaataattacaacgccggttacgctgaggggagagctgaacaagcgtttgaagacggtaaaaaaatggctgagtttatgaaaggggcgtcacaaggtgaatgacttagtaatcatgaagagccgaaaggctttaacaactagcttgaaagtagctgctacttttagtaaagagcataaaaatgtgcttcaaagtattagaaatctcaccgctgaaaattcagcagtgaaaaagatgtttgctgaaagtacttatgttaatgatcggggacaagaacagccaatgtactacatgaaccgtgacgggttcactttgcttgcaatgggtttcactggtagggatgcaatgaagttcaaacttgagtacattgaagcttttaaccgcatggacgaattaatcagaaatgaaaataacttaccacaaacaccagaggaacaattgcaactcacaatggttgttactaatcggctggttaagcgtgttggaaaagttgaagcccgtgttgaccatattgagaaaacaagtgaattaagtgaaattcaacgctaccagctgcttcaagcgagaaaaaagagagtaattgaagctgttggtggtgcagacagcaattattacaaagaaaccaaggctagaaaagtatttaatgcgtttggtaaagacttcaaaaaagagtttcaaattccacgttatgacagcttggaaaaacaatattttgaaaaagctatggaatttactcacaactggtaccccgattatgtccttcaacgtgaaattcaaaatgctaatgcacaaacgagcttaaaaatttgattggtggtgaattgatgctagatatcggagtaggagaaacaatcacagatggctttaaaacttatgtgatgggacatgacttaaatttgcattttgttagctatggcaatcatgcgacccaccatgtaagcgaagacgttttaaaaattgttttgaaagcacaggagtaaaaatgcaacgagttagaagagtaagacggggaccaggtcccgagcatagaattcaaaacgcaattattgcaactttaaattggcggcgttgcgctgtcatcagattaaatgctggcgctattcctacaaagaatggcggtctgttcaggggcgtaaagcccggtacgccagatttaatcgggtaccgtttaaaagataagcaagtattttttattgaagtcaaggcaccaaaaggtagaatcagccaagctcaacagctgtatcatctcgatttaatgcataagcatgtaatccatggtatagctagatcggttgaggacgctgtaaagatagtcaatgaaggcttagtcggctacggctatccagattacaaaggggcttagcgatgaagataaaagaagaaataaaaggcttttttgagtttttgtcgctgttgctcggcggcctgttaatagcttttgtgttgattttcgttggagcagctgggtttaaattactttttatatatttgcgttggctgtttggactttaaaggtgaaaattatgtattttcaattaattatgatagtggttgctgtttacatatgtgggttgacgttattcaccctttatcaagttctggcagataagagaaaaacttggggtttgagacttgctcaatcattttgctttgtttgtttaggaaccgttactgtgctttttgcgctgtggatgcctcatgtgcacgatattattgccgtccttttaggaatttcatttataattgttccggttttatttgtttggtcagcaggggttttcgcagattgataagcaaatggcatatttaaaaatcgaagatgcatgcaaggctaaaaacatcactctaaaggatttatcacgattgagtggaattagtgagagatctttagaatggtacgtcaagcaacaacgggagccgtctcttagtcgagtagaaaagttagcaaaagtattagaagtttcaccagcgtggctggtttcatgggagtgaagattgtgagtttagcaggtctgaattttgataaagaaaaaacgattagcaacgcaaagaattttcttgaaaatgattttccggacatcatgaattattcaggtttgccggtaacttacttatctagtccacttcttgatcctacgggcgtacacggcggtggcaatgtgaaccaccagcctgatcaatttctaaaggctatcgagcaacaagacaagtacgatgcaattgtcaaggattgtgaaaatgctgcccgagccgtggttgaagctatgaacagctgtcctgataccgaacgggatccgtaccgcaaaattttgattagaagatacgttaaaaacgattttgcacaatggatttataacgatatgaattattctccaagaacgtacggacgtaaaagggacgaagcactttatatattcgctcaacacctagagcggtaccgcaagaagtacaatgctgaaaggctaattcccgtgttgatggtgcatggatgacctatttttgaccaataaacgccaatttttgaccgataaatgaccaacttttgaccgaaaaacgccaatttttgacgcatttttgaccaacacttgaccattaaagcgggttatattagtagagtcgaaagattaggaaagagatttgatctttcgatgttgctcgttaatttaacttgttagtcaattattacgagtcattaataaactcttgtttttactataaatatgggttgtgcaaaaggtgcaaccctatctcctacaagcctagtgtaacggcaacacgccagtctccaaaactggttatgaaggttcgaatccttcggcttgtgtagtctgcgaagacgtgtaaatccaccgagcggtctgagcttattaaacattgttctagtcctgataagctcgaaggcaagtttgaagaggcttgccttttatgggcagataggtagtctgctcaccgttaagttgatacttgttattaatttagattcctccaagaatttaggtgagtagcataggttcaatacctgcggtgcccgttgagtaatctggtgcgtaaaataagcaacttatttcacaacacattcaattgaattggttacgaagtgcacccgtgttggttcgaatccaacattactcgttgtagtcagcgatgatgggctactagaatccaaaaaattcaggatcacgttaattgcagtagctgctaagctattgctttttgtttttagggggggaaaattatgaacaaaattttaacttttgccgctggtgtggttatcggtgtagtttacaaggacaccattttacaagtagcaaagcaagtagaagccgcaaaggatgctaagtttgataagaaacttgaagacaagctggcaaagcactttaaagatgtaggcgaacaagccaaggaagaactagataagaaagttcctggtgcgtttgacccaagtaatctggatggcctgtactaatgacacctacacggtactttgagttatgtcaaagacatagccgtttagttaaggcaagaaaaattgttaagtactgcaaaactaatacagttgctaacatcaagcagaagattctatttaagcaagaaacgggctttatgccgcaagattacttagatagatttggtaagaaaagttaggaaatgaaaaataacgaagaagcacctatgacagattcactttttattagaattgctaaagggaaaattgcagattaccttttagaagttggattaaatgctgatctttcaaaaagtgaattaatggcaaaaatccagatgacttggtacagctatatagctcgtaattataaggctatgttctgtatccatgattttaagggcaaagatgaagcaaaactttctaattgctattttgaagtaacttatattactaaagatgatgagtttgtagctgatgaatatttgcagtttgttccaacaacggtaaaggaagtttaagggaatgcaaaaatgaatagaaagaaagtaacttacgtggtaactaaagataagaacggtaaggttattagtattaaatctgttcctgttccatcattattagatagagtgcaacgctcgtgtgaagaacgtttctcatcgtttttgttagcagttattgttgtgttcatatgtttaatgacgattatgttagtgcttaaaagtttaggaggctaaatcatgcaagtagaagctaaatcaattgatgaaattaagccctatgaaaataacccacgtgacaacgatgacgcggttgacgctgtagcaaattcaattaaagaatttggctggcaacagcctatcgttgtggacaatgagggagtaattatagcaggccacacacgcttacgttgaaaagaaaattgctgaaaaattaggcttggttagtgtaagcacaaggtctaataatatcggtgggaaagaatactccactaaaatgtttttagtagacagggatgtttacgaaaaggctggttacaatcacggtaaaaagcttaatattaacggcaagttagttcaagataagtatgtattttcattttaaggggtattaaaaatgtttgatgaaaaagaattcgatttattgcaaaaggtttgtggattaggtacaaaaggcttagaactatccgaacaaagtttaaagaagcaaattgatttagttggtgatgatcttaaaagatcagctaataaaagctatcttagttctgacgatttagaaaacgctgctagaagattaaatgatttagcttcgcagattaagcaattaaagttaatgcaaaaccaagcagggaactttgaagcttataagaagcaacagcttaaaaaaataagaaagaaaaaagaattgacaaattaagaaagttgtttattgaactggttagtaaatcagttcttttattttgcctaaaaaggtggtgatttcagtttggcaaaagctacaaaagataagggtggtagacccgaagtaataacagaacaaaaattaaatcagtttcaaacgtttattattgctggctgtagtcttaaagaagcttgtgaacaaattgaaatctctacaaatacgtggcgtcgatatatgaagagacatccaagttatgtcgctaagtttgctaggtggaaaaaggaacttgaagcacgggcaaaattgaatattgccatgaagatcactaacgaaaaagataccgaagcaagtgtttattaccttgaacgacagactaagttaagagatcaagcggcaagaaccagtttaaatcgtgctaaagcccaacaaactcgtttgcaaaacaagttgttaaagaaacaacttgaacagattgataccactgcaagtaaggcaagagatagcatgagcaagttagacatggataccttaaagcgtttagcaaatttagaccaaggagttgatatcagtggaattgactaatgaacaaaggcaaggtatagcgttagcggctagggaagaactagcacgcagaagctacgcctattattttttattggctaattctgatattaacgccaagctttatgattacatcgagtatatttgtggcaagcttcaagaaataattgatggtaagcagaaacatttgatactggaacttccaccacaacacggaaaaagtatgtgtgtgactgagactttcgccagctattacctgatgaaataccctgaaaatcaggtaatggtaacgtcatatggtgaagatatgtatactcgttttgcccgcaaagaaagacagcatttcactgattgggctaaccgattattcggcttgaccatcggcaaaaatagttccaatgattttaccgttgcagggcaccgtggtgaagcgtattttacttcaattcaaggtggtggtactggtcgaccagcggacttgttgattattgacgaccctatcaaagacgcaaaagaagcacaatcgcctacagtaagggaaaatatttggcaagaatggacttcaacattttcaacccgtctatctgctaacgcttctattatcgcaattatgactaggtggagtaccgacgatttagctggcagactgctagacaaaatggactttgactgggaagaaattaagtttcctgctattgcttatgatttaccaagtggtcaaaccgatgctataggcagacgtaatggtgaagccttaaacccagaaaagcatccaattaagcagctgctaacccagaagagtaatttaggtactcaaaaatttaatgctatgtaccagcaggcaccaacggtgcaggagggtaacattattaagcgtgagtggattaagttctatgttcctgatcgtgagacgatggcgcggcttcacttaactgaaaaagaagtcaaaattttgccacgacacttgcagcaaaccattcaagcatgggatgcaacctttaaatctaaagaaaatgacgactatgtggcaggtcaaacatggtcaagacgtgatgcggaggtgtttctgcgtcctggttggtgccacaagcggttaagctttacacaaacgctggaagctattaagtaccagtcaacactttacccagaatcaacatcgaaattagttgaagacaaggcaaacggtcccgcaattcttgatactttgaaaaagaaaatacctggaattatgccagtatcgccaggggcggacagcaaagaagcccgttttgcttctgtttcaccgtacttcgaagcgggacaggtatatataccgcaccctaaatggaaacccgaatcagaagaattgattgaagaatggtgtgggtttcctaacatgccgcatgatgaccaagtagactcagccacttatgcgattaagtacctaatgagaaataaacgggaaatatcacttggatttatttagaaaggaggtcattaattgtttggatttggcaaaaagaaaaagctagcacaaattacaatcggtgccgactttatggattatgaaagtaaaggcgtaacacccagcagattcggtgatacgtcttcttttatttcaacaaggtatttagatagaaaatacaactataaacaagctgactatctgtttaagtctaatgctttagctaaccgaattgcccgcttaccggctgagacagcaactcggaatggctggcggatagtgattaaccacaatgatgaaaagcaagtagtctatcaagcggctttagatgcattattgcccaaagaaaagattgctagtgaaattatttatagaaatatcattggagatgcgtatttaaacgtcaatgttgatgaaaaacaccgaactagcttagaacagccgttagacccgcacaacattttaaaagtcaattcaatcaatgcttttagtcaaatgcatgtcaaagctaaccagatttgtaacgacccaacgctagaaaactttggcaaagaagaaaagctggtacttgagggcttatctgatggctcagatgataattctaaggagcctgaaagtatcacaattgacagtagccgctatagacacatttcactggacaagatggaagacgatgcaacgggtacatctttgctaatgcggtgctatgaccagattaaaacccttgacactggtttgtactcgacaggaaaaatgctttacgagtacaacatgaaagtctggaaaaacgccgcttactttgatttgtctgaggatgaccgacgcaaaaccgatcacaggatgagccgcggcatgagtaccgagtcactggtagttgttgggcacgatgacgacttagaaaaagtttcaaataagccgggcggtattgattcactatttagttttgcttggcaacaacttagtaccgcaactgggattcctaaatcgattttgatgggtgaacaggctggcacattagccggtgcatcacaggacgtagtaaattactacgatagtatcggggctattcaagagcaggtaattaagccgcaacttgagtggctggttaagttgctgatgtggtccgaaaatgtgggcggcggttcagaagacccagactcattagattggcacatcgagttctatcctttgcggacactcaccgatagtgaaaagattgataaccttggtaagctttccacagcgttgtccacagcaattaatggtggctttcttactactgatgaagcccatgatattctgcttcaacaaactactaacgaagcaatcccaatccagttgactggcgatagtgccgataacgacattaccgaccaagacagaaaatcttttgccaaagaaaaggctaagattgaaaaacacctcacgggagcaaaaaaccatgacaagaagacgtaaaacaatcccaaagacaagataccccatgaacttggaaaaatcgtatctgggggctttaaagcgtcttgtcttgtcatggaaaaagaaagcgcaatggtatgcagaatattatttgaagaattacatgttaggcggagcgttgtcgattgattcagatgatgatgaaaatgaccctcacaaaatagagcggttgtccgctttgattgcgttgatgatattggctataaagaattctaatagtaaacaggaacttgaaaatgttgcaactcaatttgtactgtcagtaaatagtttttcttatagcaatgtcaatgcgcaagctagggcaatttcatcacaagcaattgaaagcaatccgactattcaagcgtttatcaaagcaaagattaaggagaacaccgcttatatcacttcgatgcgggataagtacgttgcacaattgcaaagcgacatttaccgcgcaattagtgatggtaagggtgccacggaattaaccaacgcaattgttaagcgtacgaatatgtcatataaccatgctcggctaattgctaacgatcaaacaggcagtattttagccgagttgaataaataccgcgccacacatgcgggctttgaaaaatatctatggcaatccatggaggatggacgggttagacctaaacaccaaatactagatcaacaagtttttagatacgatgatccagatggcggtgacgatggacagcttccaggtgagccgattaattgccgttgtgttgcgatgccagtaatagatgattagcactcatgaagggtgctttttttatgcagaaaggagccagaaatatggcagataatacaccaacaagtacaccagcaggtagtacaagcaagcccttaacgggttcacttttaaatagtgctaccaagccggttattgataagccaaccagttcaccggttatgaagccggttgaaccagcaaaggaccctaaaggaatgtttgattggtctgacgctaagccttacgtgattggtaaagatgaaagtttgtttgatgtcgctcaaaagttctctgtagctttacagcaacttagatacttcaaccacatcaacaaagcaacgatgaaggttaaagaaggtcaaacaatttacattcctaacaaaccggttgaagttccttacggtgcatagcttatgggcgcaattaggtatgaaactactacgccaatcgataaatttactatcgatccaataacggggtttctgcacgtcaagaatgtgccaatcacatgtgagggcgtacgaccataccgtcaattcgatgggcaacgaattcaagaagctaagacaccagaggaattgttctcagctgctacggttgattcagccaataacaaaccagttactgacgaccacccaaccgacgcaaacggcaacacaatcatggttaaccctgataattcccagcgatttatgaagggctttatgtccgatcatgcccgtgttgataaagcaaccaagactatcagaaatgatttgaccataactgatagtgacttaatcaacaaaatcaggcacggcaagcaagaattatcaattggttttcaaatgcagcttgatccaactaaaggtgaacttaatgggcaagcctacgatgctaagcaaaccaatatcagaattaatcatgttgcgattgtagaccgtggtcgcgctggtcactcggtaaggctaacggctgatagtgcagaagaaattcctgaagataacgaaaaaaagaaaggtgaaaagatggactttacaaaagtacataccaagcaaggtgatattagcgttgctgttgaagatgccgacaagttaacgaagcttgttggtgacgctgacgacagcaacagcaaattagaaaagcttattgcggagcgtgacaaacttaattcccaaattaaggagttacaaggctctggcgataagaacaaaaaggaagccgccgacgctaagaagaaggctgatgaagctaactcacgcgccgacagcgcagaagaagaaaataagaaactcaagtcacaacttgcaggggatgcattcgaagacagaatcaacaagaccttagcattccgtgaaagagctaagaaagttgttggtgacagctatgactttgccggtaagagcgaacgtgaagtcgaagaagccgctcttaataaaaatttaggcgaacacgattattcagataaaagtgacgactttgtaagtggtctttatgaaggcctatttagtactaatgctggtggcgtaagttatggccgtactgctggcgattcgaacgaaaagactgccgtagagaaagcacttgaagcacgtcaaaacttatacgaaggaggtaacgaataatgccattaccagttggacaactttatcaaaagaaagaattaggtaacggaactatcggttctttaaaagattattcaatttataccgttaccgctgctactaatatcgattatggtgttgcccttgatattcaagacaatcaagccgtagtagcaactaaggcacctatctatgcaatttcggttaagcgcgcttacgtaattggtcatagttacgatgacatcgaaaatgaccactggcttaaaggtgaaaagattggcgctttacgccgtggtagcgtgtcagttccaattactgaagacgttgaccgcttagatcaagcaactattaatgctgatggtacttttagaccagctaagccaggtgagcccgttgttggtcgctttatcactgcaggcgatgctaatggtaccgcaatcgtagatgtcaacttaactgacatgggtactactggcacaggcgccacggtagacaagccatcaacaccaacaactgatccaagtactactaatcaatcagccggcacatcatcaactaccggtaccgataagaagggggataaataatgccaaaagcaggatttaatacgggaactgcctatagtgaacttttcaacgttgttgatccggttgttttacaaccaaaacgagaagaacttcaaggcagaacaatgttccagctaaaaccgcttcccgatccatgggcacttacttacgaatgggcatggaaagaaattatgggccaagcatcagactacaccgaccgtgcaacagacatcactaccactgatgtaacttaccacagggaagtaggctatgttgcagagaaggcagctggattcgaatattcacaagctgatttagagcgttcacacaccggcggtagaaatatcgatattattaccgaccgtgcaaccgctactcatgacgcgttagcaaactgggaggacgctttaattttcaacggtaacggcgattcacaaagacctatctacggtttaactactgatgctgagaccgcaggttatcaagctttagatgatccaagcgtaaccttgcaaaaggtagtagaccctaacaacaaggacgcatttagtgatgcttacaagattatcaattacttcatggatgccgcttcaaagattactttgttgcctggctaccacaacgttaagccttacttagctttgccaccaaaggagtacgaattattaacccgtccgttggttaaccaatacaatccagacaagactttatggaacatgatccaacgtaacggagctaacagcgatggtgtatttgctggaattaaacctgttaccgagcttgaagctaagtattggaacaatgaaaagggacaagcaggtaaaaagaatatgggtattgtttaccttgatactcctgatgttgcacaaattgttattgcaatggaaccacgccgttacggcacagccattccatccgctgacaacggattaagctacaaacaaatgtacatggaacgttcaggcggcttgtcagttaagttcccagccgcaattgttcagttaaccggcttgaatgatggttctgaaacatgggcagaagctaagacaaaggctaagtagtatgaatgacacaactaccacagtagggctgattaaaaagcttgatactgcaggtatgaccgatgacgtacccgatgaatcactagaagcgttgattgaaaacgcccgaatgattgctatttctgacgggtttcctaaagtaaaaaagcttcatggtgcggaaatgccagcccttgagttggctacccgtgccatgacactacaccttttagcaacgcaagacggggcaggtagcggaatgactttcgaaaaagtcgatgttttggaaaaccactatgctgataccagccgcttgaagtggttacaacgctctccatggggacagctctattggaggctgtaccaagattatgtcggcaatcccgtaaaaattagaataatcgaacactgatgaaaattgaaggttataaccgtattccagaagtaactaaggaacttgactacttaaaaacgcatcaggttgtaattggtttttttggaaaacgtgaaagtagattactaacaatcgttggggctaacgaatttggagccacaatcaagcctaaaaatggcgagtggctatggattcctactaaagactgtcctaaaggaaaaggcccgaaagatattgaaggcttgtttattcctaaagggcaccgagtagcatgcgttaacgatcacggcaagttagtggcatatttctatcttagtaagcttgttcaaataccagcccgcccgtttattcggcaggcttatttagctaacaaaaggaagtacacacaattagtgcggagatatattgcaaaagttctagcaggtgaagcaacgggtaagcagctacttagccggctaggcgttgcatgtactgccgacatcgctatgtcatcaattaagttgaagcacccaaagaaccgaccagcgactatcgagcgtaaaggctcagacaatccgttggtcgatacgggtgagcttcaaagacaagtaaagttcatgatagtttcgatttagaaaggggggtttgatctaatgcacaaaatgaatccggcaagaatgattcacaagtacggtgtagacattaaagtttggagttcggggcaattctataaaccccgctatcgtggcgcacctactgatgcccctgattattcccaattaagcgatgatgatgctgaaaagcttcatgagccagttttaccaatgtcaagtcaccttgcacaactcttcgcccagttagacggcggcggagaagtgcaaggcgatttactttggttatcaattaataaatatccaattgaaagtgtggtcaatgttccgacacaaggcggctactacaaagttactagtcgatcatcttatgaaggttatacgaatccacacttttttgagtaccaattgaagggagtaaatcaggatgacacaaacccaaatgccaccaatgatggacaactacctagtgatataccaacttatccaggtagttaatcaaaaatatcattgcggtgtatatccgcaaatgaatgccggtttgcgtagcaattacccgtttattacttatgactgggtagaccctggaagtgacgttactttagacgaaactgatgtcatggaagtaagacttcaaattgatgtgcaagcaaccgacatgtatgaagctttgaatacggccaatgatttacgcaagacattagcgcacagttacggatatagaggattttttaaacaagcacatgtgattccacataacgtatcaggaacaagctctcgaaatttctataatggcacgcaattacccgtttatagatttggtttcgattgctcgttttctatttaccgtgctggaactatctataaaccggaagaccttaactttgaatttaatgaaacaacgattgaatcaattaaggctatgaatcaaatgacaggaaaagaaataaacgtaagaaaggaagaactttaatgccaacattaaccacggtcgccccttacgaccgccctatggatgtgaacgtcattatgactgtcctacatccccaaccaattaaggggctaggtaatattttgctgttaaatgctactactgcagctgctaacggtgattcagctggcaaagacgacaagggcgcacaaaagacaccagctcaaactttgccagatactttgtcaaacaccgaccgcttgaatggtttgcttttacgtaagactgacccagctactggggcaatttaccgtgaatataagaaccttgatgcggtggcagttgactacaaagaagattcggctgtttacaaaaaggctacagcctactttgctcagccaaagcactcagaccgcttagccgtcttagattatgacaagtcaaaggcttacgatagtttgaaggctttctggtacttcaactggacttttggcgtatgtgtagacaacacaattgacgattcaaccgttcaattgtcaaacatctttgaagtaaacaaagatcacttcttagttctccaaactgaagatttgtccaagtttacccaaatgatggggcaaaactacactatcggcttgaagcacgatttgaatgagccaatggacgccgcttttgtcggtggcattgctcttaacgatgttggctcaattacttggaagtttaagcaacttgaaggcattacgcctgaaaacttaactagtcaagaattggctggtattaacaatattcatgctattgcctatgaagaaatgatgggcaaaggtcaaacctcagagggaactaccttatcaggtgaatatattgacttgcttcacggtgtgatgtgggttcaaaccgaatgtcaaagccgcttgcagaagcttttgcaagataacggcaagattccatatgaagctcaaggcattgccatgattcgtgcagtcttaacacaagttttgaatgaagcgtacgacaagggcatcatcatgactgacgacactactggtcgcccaatgttcagcgttactaccactccacgtagtcagcaatcacgccaacacttgtcagacagattctatgacggcgctagctttgaataccatgcttcaagcgctattcatactattaccgttaatggcgttgtcgattcagacactatcatggctgcttaattagaaaggggagtttaaatgccttcaaagattaaaacatctaaaatgcgtgaatatgatgccaatgactgcaccattatgatcaatgacaaattgatgtatggattttcagaaaacagcatgtttacggttactgataaaactgatgcaaatacgtacaagattgatccacaaggatcagctactaaatcgcacaataacaagactatggcgggctttacattgccattagatgaaacatctccttgcaatgcctatcttttagacttgtttaacaaggatgaatttttcacagttgacatcattgacacaacatcacacatttcttgtcattatgcatcaattgacaagattccagataagcaaggcggcgcacaagctggtgaccgtaattggcctattacaatgcttaacaaggaagaaacttcgaacatgacctatagcgattaattcgaaggtttcaagagactttcatgaaatcaaattaacttaaaggagacttaataatgagtgaagaaatcaataacgcaaagcttgccgaaaaggcgcacgaagaacaaatgaagattaaggaagaagcggaatcaagcaaggtcacacctttgactgctctttctaaaaccgtaaccattcgtgaagatactgatcaagaatatcaattaaagcttcaattccctggagttgaagaagcaactgaaattctggaaaattcccgtaacccgtttggcgcaattaatcgtccggaattgctgagagaaagcttgaagcacgtgattatccaaccaaagattaagtcaattaagtggtggaacgatcatgaaggtctttatgaagccgccgaagctgttttgaattttcttactgaaaaactctagacagaaactaggtaatagagaaattgaaagacaagccgattatgttgaactccctctgcgtttgataatgcacgggattcctgaacggcttgtaaaaaatgctacaccagatcaattattgattatggcaaaggtagtagaacgggacatagaaacaacaagtattagtcaagcaaatcatatcggtgaattgtttggcggtggtgataaatagaggtgatgcctgtcaattaaattgatgggtttttattttgcctgaattttaaagaaaggagctgaaaacgtggctgatatcgaacatctaggaattggaattaatacaaacgttgaatacaattcgctaaaagaagcagagcaaacaactagaaagtttatttccgacctcggtgttttagaaaaacgctttgatcgtttaaaggctcctgactttaccgaacaattcaacagaaacagaaattccgttgaagagacaagtcgtacagttgctggcttaaaaaagcaactaggcggcatggcaaccactagtggtcaaaccaccagcgaagtcaaaaagcatttagaagaaacaaaaacttcaactgatcgattaattgatgcaaacgtaaaattaaagtcttcaattgctggtgtcggtgattccgctaaaacaatgggcggtttatccaacacaatctggaaagctggcgattctgctaagactgcttcaaatggctttaatacggcaaaagatgccactgaaaagactaacgaagcactaaaaaacaacagaactgctagtgataacgcaacaaaaggctttaatttgcttcatgatgcgggttcaaaattaattacctttgtaacaggcattgcggcggcaatggttccagttgcagcggcttttaagaatgcaaatgatgaagccactaagctagctgacgaatacaacgttattaagaacctgcagcaaactggtggagatagtgccgctactgctaagaaaaatacggcggctattagacgtgaaaatgctgatttatctacaaaatatggcgttgatcaaactgagttggcaaaggggtcagaagagctaattaggcgtggttattccggaaaacaagatttagccgcacacaagtatttcgtacaagctgctaaagcgactaatgagcattatgatcaaattgttaatgccgccgctcctatgcttgaacagtttggctataaaaagcgagctggtaacagtactaagaagatggcacgttacacacgggaagttttaaacaaagcggcttatgtcggtgacatgacatctggtaaagttggtggtgaaaacggatttggtaattcttttaaaatgtccggttcaattcttcaccaaacaggtcaatcactttcgtcatcattggctgtacttggtactttgtcaaacttcggtgaagaaggcacctctgctggtactggtgtaaggcaaattgtctcaagtttaattggtgcttcgaagagcaagacaaagaccgcggcactaaaagatttagggttatcgcccgctgatttctttactaaatcaggcaatttaaagcagttgcctgccgtctttgatattcttaaccgagctacgcagggcaaaaagtctaaccgtgttactggcgacttcaaacagttattcggtcaaactggctttaacgacgcattaattttaactaaaaataatcgtgatattgctaataacgttaaggatgctaacagagctgatagtacaaattacattactaacttatctaataaaaatatgaagtcactaaaaaaccaaatggaagtgacacgacagcttttaaagcaagttggaatgcaatttgcccaacaaatagcacccggtttagctaatatgcttagattagttaacaaggtcttgcaagccattaaaggatggcctgcacctgttaaaaagaccttaggttatatcaccgctattactggggcgttaagtactggatttgttgctaaaaaattagttggcaatgtgcttggtattggtggtaaaactgtagccaaaacggcggcaaagggtgccggtgaatctgctagcccgtcccttttaggtggaacgggttcacttataggcaaagttagctccaacttaattggcggtaaatttgcgaaaactggattaggtcaaaaaactgctggtcttttaggcggtacagcaagcaagggggcttctgccctagcgattggcggtattgcccttaattctggtattgatctttacaaggcaatcaccacaaagaatcctaaaaagaagtttgaaaactatggtaaatctataggttctgcaatcggcggcggcgttggtctttatcttggcggtcccgctggtgcggctatcgggtctactttagggcaagtagccggcaaatgggctggcgacatggcacgcatatttagcaaaactaagtttggcaaatccgttggtaaaaccttcaagcaagccgtgtggtcaattaaaacaacttggcacgatgctggtatgggcaaaatgattggtggcactgttaaaagtgtcaaaagatcatttagcagtatgactcgtgatattgggcgagattggcgcgaccttaaccggaataaagattttaggaatttcaagaacttcttaaagtcaggattgatggcttctttaaagcttgctattaaacaaggcgcaacagtcattaaaactggtattggcattgttcgcggagctgtcaaaattgtaacgtccaatattaaaggcattgtccaaatatcatcagggactgtcagaacaatatctgatattttccacggaaaatggggcaacgcttggaaggacatgaagggcgttgcaaagtcagctattgacatggttactggaaggctatccggtcttaaagacatgtttagctcagttattggcggtattgcaagtagtgtcaaaaatgtttgggattttgtatcaggtaaagactggaagacaaagaagcctgaaaatagcaccagtgttgcaagtgctaacaaatccgttaaagctatgcaaaacggacaaggtggtaaacatcacgccagcaagtcacatgctactactattgctgacattaaccgctcgactcacttaggcgctcatgctaacggtactgcttcattagttggtgaagcggggcccgaattagcttacaagccttattccaaccatgctcgtttgcttggcgctaaaggtccgcaattggcaaatatccagtcaggtgaaaaaattctcaacgctcgcgacaccgcaaaggttatgagtggcggtctcggtgctggattaaagctcaagggatatgctaacggcaacgctagccttggtaaaactaccaagaaagttactgatgactacaagcagattgcttctaagtcgtccaagtcacttaatgatcttactaagaagagcaattcaagctggcgcaagattacaagcactaccacaaaacaagcccagaagagccgaaaaggggcaatagacgaatacacccacatgcggacaggagttcataagcaaatggacaagatgcatgacggtgtagttgatcttgcttctacgactgcaaagggctttggtaaagagctaggtcacatgaccaagtacgctcattctgcaatgggcgacacaattgaccaggttaattctggtattaagggaattgatcaagttcttggacagtttggtggtaacacgtcagtcatcaagccagttaagttcgctaaaggttcaaatgggcgtttgtcccaaaacaccatggcaatggtcaatgatgcgacaattggaccaagacaggaagcaattatcaaaaatagcggtgatatttggattccaagagggaataacaggatattgccacttgaaaaaggtgattctgtcctcaatggttctcaaacacaagaattggcaaattattggggattacagcgttttgcgaaaggctctggcgtaagtcatagcagactaagaaaaatcgctgagacagctggaaataatcctgctaagagttttgctgatatgtacacttcaaaaattaaggcaagtggtacagatttacgacaaggctctattaatttagctagaaattcatcaactaagttaggtaatccatggtctaacgcaatgtgggccgtcattaacaacgcaattggcggagctaatggcaagggcggaacccgtgaaggatttttaaagtacgctgaatcaacattcagtggcgttaagtaccaaatgggcgcggcaagcaagacgctatccgactgttcgggtatggtcatgcaagctttacgtcactttggcgtagatattggacgcacgactgtggcaatgcaacacagctcaggtgttgaatacctaggtaagtcgttatctaagacaattccaggtgacttggttatctttggccatggaacaggtgccgctggtcacgtgggaattatcaaaaacccacacaccggaacaatgttcaatgaaactccgcctcatgctcgtgtcacttcgattgctgacgacaaggggatgggctacggctattaccgtgttcgtggcttacacaacgccagtcaagccaagaaaacagcaacagcagataaaaacttgatggctcttgcaaagaaagaattaggtaatactgctttgagttggatcaagaaaaatcttagtgatgatcttggttcattaggctcatttagtgttggcggtgacttagctgaaagagctaaagccctagccggtggattgaagcaacttgaccccaaagcaaccaagaatggtattgcagccgttttgggtaactggaattttgaatcaggtggtttaaaccccggtgcagttaacagcagcggtggtgcttccggtttaggtcaatggcttggcggtcgtaagtctaacttaattgcttatgctagacatcacgggacaagctggaaaaacgccggcacacaattaagctttgccgttaaaggcgaaggctcagacagcgctattcttcgctccgttttggaaggaactggtagcgttgccagcctagcaaacaagttttcatctgaatgggaacgtggcggctacaacgctcaacacgtcaaaggtgccatggagatccgcaaagttcttggatacgctaaaggcggcgatcctgtcgttggcgacaaggttttagttggcgaacacggtccagagcttgccgaatttaaagattcggttcacatctactcaaatgaaaagacgcggcaaagattaaagccactaacttcatctaagccaaaagtacgcccagtaagaggaactggcggggctttaggtggcattcaagtaaccgtaaatattaacggcaacgttgatggcgatgatgctaaattgcaaaaattagcgaagatgataggcgtagaggtagatcaacaagtacgccaaaagttaaatattattcttgatcatattggcgatgatacgggtgatgatgacgatttcttatagaaatgaaggtgatgctaatggttcaagcaactaagccaaaaaagagaacagctgaacaaaaagcccatgactctatgaaatactgggacaagcggcaaaaacatgaaagcgccgtttaccgaaaaatgttttcaaaggcgcagggctatgatttcgattcacattttgaaaagaatcaaattaaaaagaaaaagcttatccgaaaacgtgataattgtttgaagcttgttgatgccgcaaataaaaggaaaaaacaagcagaaaacaattataaaaaagcaaaagacaagtacgaccgtatagttacgcaaagaattgatttaagtaacaaactggcggagattgcggaacacaacacgggttggaaaaatgaaggtaagtgtgctatttaccgttcagacggtaaaggcgaaattatttacatttcgccagcggatggtgaaagtgaaagtgtttcttcaaacattacttcttatccggttgatgaaggggcgccatatagctcatatgctcgggtaaatagtaagggcgcaacagttgcaggtattattgttggtaaagataaagctgattcgtaccgcaaatggcacatgcttagtcaatggaatagttcgcatgttcggttaacatatcgaggggacttctgctacaagcactacctaattgcaaacatgaacaacgactataagaatcttcgagataacattgaagtttcacttacttttcagtttgtctatcaagcaaaaatcaccacttcaaacgatagtaagcatcacagaaaatcatccaaggcttcgaaatccgttgcgggtaacagaactaagaaatataccgctattactattaaatctggtgatacattgtgggctttgtctaagaaatatggcagttcggttcaatggatggcacgagtcaaccacattaagaatcctaacttaatctaccctggcaataaaatacgggttgcgtaggcggtgatttagatgagaaattatcttgatgttgatgttaaaaatattccttatatctttcaaataacccttgtgggcgatacctatgatatgagagtagattacaacgaagttgcggattactacacaattacaatttggcataacaataagaggcttctaacgcaggagcctcttttgcttggtcaattagttggtattgatattcctgatccagaattgccacgaattgacattcgaaccatggacgaaacgggtaaggcaacagaccaaggcaagggaacatttggatatgaggtccgcttgtatcttgatgttgttgacccgaatggatcagaaacagaagacccatcaattaaaccgctaggttatgatcctaacgaaaatgatgacgacctaacggatgaggaggtgtcttactaatgatcgttactaaagatccacatatggaatttgtggcggttgatagtaaaggacacaagcaaatcgtatataacgatgaaacttacgaacataattatccttttacgtttgaagtcccgtttactaatgatcctgtcccgtctacttttacaacaactattttcaatttaaccaagcaacataaagacttttataaaaaagggatgcactgctggataaattttaactggggtaaagaccctaaaaaaatagctgaaggatttatctctaatacgggtaaattaagcaatgatgggacaactgatagtaaagttttaacttttactgaaggcacaaattacagtaatgtggctgcccgaaagttgaagctaaaaaagaataaaaaggttaatcactacaaaaccgtcaagatcactgaaaaaggtcattacaagaatcagcgctatagtacctcagttgttgagacctataagagaggtccaaaaaaagggcaaaaacacgtggttcaccattgggcttatcgaaaagtatgggttaagcccaaaaccgtaaacaaaagggttaaaagtcgtgataataagacttactttgctaatcgagtttatcgaaaaggtacgacttataagcaagtaatcgagggaatagcggaacaagctggtattaaaatagccaaaattgatttagcaaaaaatgaaggaataaaaaaatcctttaccgctaaaggaaagccgctaaccttgattaaaaaccttgttaagttggctgagtcagagatgttttatgaacgtggcaagcttgtaattgttaaccctaatagcaagaaaaatacttggtttgtgattgatgataaagacttaattcaagttccatcacaaaacgatgatgataaaaacgggacaacttggcaaattattacgcccttagtcccagaagttaccgttaataccggtattatcatgaattctaagttcttaaaaggaaaatttgtcgttaaaaatggacagcatagttttgatggcgaaagtccacaaactcaatgcaccattgcggcagttacaaaagctaaggctggtcataaaacaaaatctaaaagtaaaggcaagaaaaaaggtaaatctaaaaaataaggagatgacagtatgaaacaaaaaaatagggttccaattcgatggtatgaaaacattagtaaggtgaaaaaccgattcagcagaagtcttgaatctgcttttttagctaaagttttaacttacgacaagaaaaaacacattgcagatattcaaccgctggcgaattggatcgatggcactaaatcggctcagtacttagatgttccggttgccgaatcttgctataggcttgatgaattgttagataagtttaagtcggattttaaagccgttgatagtagcccagaagttaactcacattttttagaacattatccgaaaaagaagtctatgagagttggcgctgtagtgatagccgttactatggaccgtgacattggtaactgggacggtacggggaacacctttacgccaaataccagtagaatgcatgatgcaaacgactcaattatcgtttctgtttataagggtgacgacgatggctagagatttatttatgagtgataatcatgatctagtcattgatccgattactcacgatttagaaatgactagcggtcttgacgaaatagctcaaagaattaaagcaacgctagaaattcggtatggtgaaatgcaacggctagaccccgaaatgggggcagactatagcagctttttaggtaaaaacttcaataaacaagcggcggagaatgatatgcgagcggctattgaagcaaatgttccggaagttgaaaccgttgataatatcgaatttatcaagaagcctgaaagaaaaatgcagattaattttagagccaccgcaaatattggtgaagtagagggggggttacaagttgacaactgattttggtttaaaagaaacaggctatattgccccaagtttcgcagaaatcttagacggtgtggaagacgattttcgaacgcggcttggagatgacattgcgttaacaagtaatgcctatctaggtatttttgcccgtttaatgagtgatgctgcttacgatttaattcagcaacaggaacaaatttactattctggattctattcaaccgctataaattcagcattagaccgattagcgggcaatatcagtttgacccgtaaagttgacgctccatctcatgcggaagttgtgataacgaccgaaggcgagtatttaattcaggctggcgaaaagttcgaaacagaagatggcttggtgtttgatttaaccgaggatgtcatcacttcaaagcaagatgatggtacttttcaaggaactggaaacgttgaatgtgaagaaactggcgaatttactaatgtaccagctaacacaattactttgtttgccaacccagatgaagactttatctctgtaaccaacccacagcctgcaggcggcgggcaagattatgaagacgatgaaacctttagaaaacgtttaattatggaaaatgtcgcccgtcctggtcctacagaactaggtattaaatcggcattaatgaacctcaacggcgttaagcaagttggctttattgacaacgacaagtataagacggatgaatacggtaatcccgaatgttcagttcacatttatgttttaggtggtaacgatgatgaaatcgctaaaactttagttgataaatgtgcggccggtatcaccttagctggctcaattgttaaagaagcaccagatgcaacaggaaaggttaaagaagttaaatttaaccacgctcaacaacataacatttacgtaaaggtcgatgtttcaattaatgacgactggaacagtgatgcgggggttgatgacatcaagcaagctatttgcgacgaaattaattcccttgaaatggggcaaagggtcaattttacccgtctttattctgttacctatgacgttaacggtgttgatgatgcaaccattgtaattggtagtactaaagataaattagcagaccaaaatattttaattggtcgttccgaatttgctcattgtgaccctgaaaatgtggaggttgatttaattggcttatgagacaacagatcagctgatcgcggaagtagccgaccactggaacaagaaaaaagataccgttttttaccagctgctagacagttataattcactgcttgaaaagatcagtgatgaaaacgaaaaaattgcagactggcgaagcattgacaaggcaaaaggcacaacacttgatttaatcgggcaagattacaaagcttatagaattagtgatgatgatgaaacattccgtttcatcatttttttacacattttaatttctagggctcaaggcacaataccatcaatggttaaaattctgggaactgccctagatgcaaagccggaacaatttaaagtctataaaaccggccttcgtcatgttggtatcgaaataccgtgggacaatgtgcaaacacttcaaatgcaaaaatttatcataaagaacattcaaaatctattggcaatgggttactggattgatgagattgttttttatgtaaatgttacaactaccgagtacattggtgccgcttcaattgatgaaacggatttaaacattgatgttggttccagctggtggactggctgggaagagtcgcaacagaacacagaatatattgctaccgctgtaacagcggaagacgtaaatatgcatcaggtaacaactacgtggtggacaggttggcaagaccaacaaccatgtgaatcttacattggtgcaaaaccattggttatcgtttcttacaaaatgatagctaattagaaaggaaactatggatacaacgactagtaaaaaaatgaatcaggcgctagttacagatatagggcgtaatttgttttcaaaactcggatcgggtaaaggcgaaatcctttataccaaagccgcactttatacgcaagatttaagcggaatgaccgatgaacaaattagggctttgacctctttagctggcgaaaagatgacaaccggcattaaggtggctgacatctcaccggttgataaagaaactaaacaagtagacatcgaatttgcattttcaaatcacgatttaaatgaggatatcaattttaagtcgattgggctttacgcaaccattgatggcggcaaagaagaaattttagtcgcaattattccagctattggtactgcaacacttggagcaggttcgccagatcacacatcaacacagctaatcaagcttggcgttgcgtttaaactcggcgcagctgccaaaattaacatcagtgtaaagcaaattggcgtagtttatgatgaagatttagacgcagctattttgaagcttaaagcggagtatgacccaaaaattgcagaagcgggcaaggttaagggtgcaaagatcaacgacggagcggttgttgaacccgacaaggacggcattcttgacttgatcgttgacagtgaccgcattaaggattttccggcagatttaaaagacctcaatgacctgccaagcgggacatatcggacttcccaaagtgctgctagctttgccaattaccctaaaatgcaagatggaactaatatcccaatagtctggaaatgcgcactaatcaaagtagtcaaggatgctaatgttggataccagcttatagtgtccagccaacaaaaatatgcaatccgctattttagtaataatcattggggatattggtttcagcttccgacattatctaataatgacatcatcaaattaattgactccaaggttgacggactaaacatcggcaattacgccactaagacggacttaactagtgtttctaactcagcagtcaaaaaggttaatggcttaacccctgacggaagcggcaacgtaaacgttacctcaaccgttgcccgcggctttgatgctaatgctaatgtcgcaaccaaagaaactgttgaaaatctgcatggtggcaatcaaattttgctggatcagaatgcagggcaagacatcgttaactggaccaagggacagtttatcggcaagttgtcaacgtccggcggagacatggctgaacacagcactatcaactggaacggtgcgggtgacgttaactcacacgatggcaatattggtggtttaagctgggctcgggctactgatcaagctcagatctttgcggaaaacaacggcaatgacaacttagacctcgttttcaaactcggtgatgacgattctaaccatttcagttttagaaacgccgcaggacaagagaaagccgctattttagcaaacggtcaaatcaacagtccgactattcgggatttatacaacaagcttgctcagtacaccgttgactataacaacagctatatccatgacaccacaattgactttaacaactacctgcatgaaacgcgaacaattaaagttgctaacgtcaagggaaataatggtcccttagcaaatactgcgactatgtggggctggcttactacctaccactgggatgataactcggttacacaagaatatcggagtgctgacggtgacgtattctggcgtgcaactaatgcaagtgcttcaagacaatggacttggcacaagtacgctaatcaagataccgttgatcaacaacagaaacaaattaacgatttgatcaataccgtcaactttatcaagaacaactacttgctaggcaagcgattcccagcgaaccaagaagcacaagcccaagcttgggaaaatgcaaaccctaacggtattgcaatgattgaaaaataatagaagggagcgagaacatgctagatcatatgctttttaatagattaaaatggttcaacattgacaacaattctcagcagatcacagcaaacggtaagaaatggggagcttatccaactagcgtgaaattgaatggaacaggagcgcttgccagtgacttaggcttgggcaacgttatcggaaccccgaattgtgaatgttatgccaaaattgctaatagatttggaacttactacgtcgtgaattacgaaggacgaatggcgttcatcaaagacgaccaaattgcatctgaaaattgggaggggggtaaatccctcttaattcacttttatcaagcacttagagccatcactagaaaggtggtggttctatgatcgaaagcatactctttaatagtgaaaagtaccgtaaatacggctacaccagcattactaagacactaaataatcctgatcatcgattcaagttagttgatagcgttgatgttttagatatgaacagatacactgtggtgacttttagcaatggcgatagttaccgggctaagaactacgttctatataatcatgtagacgagccatcaacgttttttaatccaacaacgcaaggcaattatttgcaagtggactgcgaagccacagctcctggaaaagatcctgttatagaagcttattaccatggagcttatgaagataatgatcacgttatgcaggaaaccccaataacggttgattgggtaaaaatagaaataaacgtagattagcactcaaacgagtgctttttttatgcaaaaaataaccttgctcacggggcgttcccgtgggcttttttaatataatagaaaggagccaataaaatggctgatgaaaacacacaagttgcaccagtagcgggcgcagaagaaaacgctacacaagatcaaaacagtgttgctgaacaagagaagtctttgaaggctaagttcccaactctgacgggttttgtatacttatccgatcctgataacgcagatccagtttggcaccacaaggctatcccagtttttggcgacgaagtaaacgtagcgcttccgtggcaagtccacgctgaaagaccaagcgacaacttaaaagatccggtctgggcagtgggtgccactgattggagcgaaaacgacaagaacaatcaagccgttatcttgcaagaaactacacaaaagctggctgaattggacaagaagagtgctgaactcgacaaagccaacgataaggtagaccaagcattaagagatatgcaagaagttcaagctcaatcatctaagcaaaacttagctttgatgaagagctttactgaacaaactcaaaacactaatcaaattcttggtgctatgcaaaagaccttagcaatggtaaccaaggcagttggcgcaaatgctaataacgctacaccagctaacccaacaactgatactaagccagcggatcaagcaaccgataagcaatagttaaggaggacataaatcatgactttaatggaacaaattcaagcaaactttttagagatgtatcgtatggactgggaattcggcatctatgacaagaacggtatgaaggacctagtagtacaaggtttcttatcagctgaaaattaccaaaagattgtaggcgaagcttatgcgccaactactgcaacgcctcaacaataactcactttacgtgatcattagtctgctgattttcggtaaaggcttgggcttttaccttaaccgcagatttttcttttatccaccacaactagtgtggatgatgaacaacgtttacttagactgttcaatgatgattgtaggcattgcgttgctggtttacacctgttcacggtataacaacaataaacttctaggggtgttgttggcaattggcgtggtgctgctggcaataatttcatcaatagaaattgaacacgtgatttttgcccatgaaatggagtttgtccagaacgctttgtcaaatacggcggttatagcctttattatctggacagcaaggcattattcgaagcgttaggggtgatatagtgcatgtcgacctaaacagcattatatcggctttgtccgctttgcttttaggctactttacctttaagcaaaacggtaagaaaagtgatatggatagcgtggagaataaccgagattacattgttgaacagaataagcgtttaaacgcggaaaacaaaaaactactcaatgaaaatgaaaaactcagaaaggagttaagtgaaaatgaagccaaacactagaattttagattacgttgccttggtgcaagacggtgttttaactgttgacgatgcaccacaggacatcagggcggaagttaccaagtgggttcgctactttgcaggaatcaaagacgattcaatggtcaaggatcctgaaagcactacaccagcaccacaagtagaaaataagccagatactacttcttttttaactaagaaggtgactgactaatgaatttaagccaacttaatgaatatctttttgtgggatttcttgcctttgtcgctgtatgtcaaggtgtttctactggtattgatttctttgcgtctaagtcaaagaagcctttaccaaaggaagttatgaccattgaccagattgccaagttcgtagtaagtgaagccgctacgctcgacatttcaggtgctgaaaagaaagctaaggcggttgaagctttgctgaaccaagcacaaaaggaaaacaagccccttaccgaatccgtagctaagggagctgtccaacacgcatatgaccaaatgcaagctgatcaagaaaaggctacacaagatgaagatgacaatgctcaaccaattggttttgtaagcggtgatgattctgatgacaaagactagatataagacgtacaacgagtacgtttttgaatcttttggaaaatcgtttgaaaaccaaacgattgccaaaagaaaccaaatgaaaggcggtgaaaaagatgtcaaacttaaccgtatcaaaaagaagtttgggtgctgatgtcgcaagctaccaatcagaaaacgtaagctacgccggcattaaatttgcattgattaagcttacacagggcactggctatatcaacccaaaggcaaaagctcaaatcaagagttcacttgctcatgggcttttaaccggcggctacttttatgctacacactctggctctgtattaaaagcacgggcagaagctaagtacgctgttgaaaaggcgaaggcctacggcatccctcttggttcgtatcttgcggacgactgggagcagggcagtggcaacgacgtcaacggcgctgttggttcaaacactgatgctgtcatagcagctatgcaagtgatcaaagaagcaggatataagccgctagtatatgctggtgcttatgtattgcgtaaccgtctcaacacagctcgaattgtaaagtcattcggaacttgtttatgggtagcttcatataaagtcatgggtcgtcaagattccgctgactttaattacttcccatcaatggacggcgtagcaatctggcagtttaccgataactataaaggttacaacgttgacggtaacatttccttgattgatttaaaggctagttcaggtagttctcaatcgaaatcaactaagacgaccgtagaatcgctctctcagcatcccgttgtaaagtggaatatcggtgctgttgcagtagtatctaattcaaagggtgcttatgtctataccagttccaaacttgataagcgagaaagcgacaagctaaaaccacaaggatcaatgtggcaggtgttcggcttggaaaacggtgccgtcaaagttggcaagaaccaatattttgatggtcgcgccgtttacgtgaaggctaaccctatcgcatataacgatcaaaaacacgctgtcgccaagattgttctgcctcacacccacgccctagacgcgccaaaagctgacgctggcaaggtctacggcttggagcttaactccaaagtcgagatccagggcagagtcgggcgcttcttaaagattaaagagctacacaaaggcaagcaagtttatgtgacgggtaaccgtgcatatatcgtgttatagtagtaaaagcaaaaattaaaatttatatatgtagacaggagttgaaaaactcccaatatcgtgcaataagccaccttgtagacaaaagtctatgaggtggcttttttgcgtttcatcggacacacattcagtgtttactatccaataaataaatatttaatgttctatgttcataaacaaatattcaacattaggaaattttattagttttgaaaagaagtgtatttttctacaaaaaagtgttgtaaaaaacactaaaagtggtattatatatatgtaagcaaaaaacaaagaagaaatatgaggtataaaaaatgaagtttacatcaagagatttaatcaacaagtttttagaaaacatggacactcaaaagggtaagagcctagacattgctgtttcaaacatcttctacgataaagatgttttggacgacgaaaacattatctttgctgacgatagcgaagcttataatgcccttgaagaacttgcgcaagttcaaaaaggtaatgacggtatcttttcagtgattaatgttgctagaaaggttatgaaggcaaacgcggaagatgaaaaagccgaaattttaaagaccatggaaaacagcgaatacagggaccttaaacttgctaaagttgacgaagacttagaagttgaaatgcatgatttaaacagctcatggagcttagctcacaaatacgctgagtggattgctttaaaccgtatctgctactatactgttaaaaaccaaaatacctacttagacgatgaaaactttaaagaaattcatgacaagcttgaaagcttattagctaaccaagatgatcctagacttgatagagctctaggctaccgtttagtttcaattgaaaaataaaatatttagtaatgtgaagcgatgcagaacaatccgcatcgcttttttattcttttaaaaagtgtttttttatacaaaaaagtgttgcaaaatacaccaaaagtagtattatatatatgtaaggtaaatacgaaaaaacgaggtataaaaaatgagtatcaaaactttaaacgatcttattactgtattaaagaagtctattgcacaagatgaaaaagatggcgacagagaagccgcagaagttcaaaaaacacagttaaagcttgctgagcgcttgaacaatagtgatgatggttttattgcaagtattgaaaactatgacggtaaaactgtaatgtgtgcagacgatgaaactaaaagattttacattttctacacaaatgaagaagctacaggacgcagtgcaattcttggctatttaactaccgatgaagctaagcatattttagatgattgcaaagaagttatagatccagtaacttcaaccacttcttacgctgatcgcattgtcaacggctacaaaaaggcggtagaaacaaacgacgagttcactaaaactaagattttgcttcaattaaataatgaattcttagagcactacaacgatgtgtacggtgagaatgccatcattaatagattggttgatgatataactaaattgtataaatcaagaattattgatttttcagatttaaattaatgggcttatactcaaatgactaagataatttttgaaaaaagtaagataataacggaaacaaagaaggcggccttaattaagacaccttctctatataagttgtggctgccgaaatctttaattaaaagaaaaatgtggtttttagaagcttttcttccttcagatatgaaattcaaattattcactcaaaatagcgaattaatttgtacaagtaaagaagtatggggtgcttttaacgattcagattttgcagcaacgcaccataaggatgaagaagttatatatcacaaaccaaagaaaatgaccccgaagaaggtgcaagtcgatgactcccttaaacgataaccaaaggaaggcaattaaaaagttagaaaaattacgggttggtgcgctctttatggagcccggaaccggtaaaactagaacggctgttgaacttattaattcctctaaaacggattatgtactttttatagttccttttcagactaaacaaaatctagaaaaagagttaaagaagtggaaactgcgtcctaaataccgcattgaaggcgttgagtcacttagtgggtcagataggctttacttggaattgctaaaagaaattcaaagatacaagtttccttttgtggtgtgtgatgaaagtttaaaaataaaaaatattcacgctaaaagaaccaaaagagttatgaagattggcaaatatgcttactacaaattaattcttaacggtaccccaatttctaagaatgttttggacatttatccgcaaatgcaatttctgagccctaaaattctggatatgagttatcgtgaattttggaatacttttgtagaatcagagacgcaccaaagcttatattcgaattacacaatagtaaaagacaatgtgaacattgattatctttattcaaagattgaaccttacgtttttgatgcaaagctaagcatgaagatcaatcaaaacgaacataatgtagagtacacttgctatgattcgcatgcgtattatcaggctaaacaagaaatgcttgacaacctatcctttatggaagacctagactttttagcaatgacgcaaaaaatgcaacattcgtactcactggatttgtggcatatagaggcttgtaaagatgtgctaaaaggacttaaagggaaaacaattatttttgtgaagtttttagatactaaggactatctacaaaagaagttcccacaatgtaaagtaatgacttatggcaagggatcttttgggttaaatcttcaagaatacaaaaacataattttttatgacaaaacatgggattatgcccaattagagcaagctaagcggcgaatttacaggctgggtcaatcagaagatgttgattactactttttaactagtgatctgggtttagataaaatgatgagaaattgcgttaaaaacaaaaatagcttgcttaacttcttcaaagacgcaagtaaacgattggaggctgtaaatgagctctaaaaattatttaaacatcaacgtttacgaggctacacaaaagagattgaagtatatttttgacgaatttgataacgtcttagttgctttttcaggcggcaaagatagtggcgtactgcttaatcttgcctaccaatacgctaaaaggaatgatcagcttaataagctaggtatgtatttttttgattatgaggcacagtacactgcaactataaaatttgtcaaaaagatgtttgatcaatttaatgatattaaacggtattggctatgcttacctaattctgtacgaagtgctacatcaatgactacgggcacgtggatgccgtgggaaaagtctaaaaaagatatctgggttcgccctatgcctagaatggattacgtaatcaatgaagataatgtgccgtggggctataagccagctgctactaatcatcagtcacaagagggttttactaaatggttttcttcaacacatgggaaaactgcgtttttaattggcattagagcggatgaatcttataaccgctatcgtgccattaaatctaataaaaaagccaatagctataaaaataaagagtatctggtagccaaaaatgacataacaattaatgcttatcctatatatgattggtcgattagagatatttggatatgtaatggcaaaaataattttccgtataatgaaatttatgatctttactatatggcagggatgccaattaatgaaatgagagtcgcatccccgtttatatcggaaggtttaacagttttacattattaccaagtgattgaacctgatacatgggctaagatgttaggaagagtaaacggcgttaatttcgccagtatttatggagaaactgctgcaatgggacagaaacccatcaatctacctaacgggatgacatggaagagctactttgaatttttgcttaaaactttacccgaacaaacgagaaaagattatcaaagactctttaaaggttaccaaaataggactacgccaccatacaagcgaatgtgtattacaatcatgaaaaatgatcataccggtaagtatatgggacctatcagtgctaaagcacaagaagaaaggagaagaaaaacaattgaaaaatacagcaaaattttgtagtccggcgtataaagtcagaccggtacccattgagaaaattcaagctaatgcttataaccctaaccacgtagctccgccggaaatgaagttactttatgagtctatcaaagacgacgggtatacaatgccaattgtttgctactaccttaaagatcaagataaatatgaaatcgttgacgggtatcacaggtataccaccatgttgaagcacaaagacatttataagcgtgagcatggtatgttaccagtaagtgtcattgataagccaattgaagaccgaatggcctcgactatcagacacaaccgtgcacgtggagagcatagcgttgatttgatggttaacatcgtaaaagaattaaaagatgaaggtatgtcagacgcttggattatgaaaaatattggaatggacgcggacgaattgctaaggcttcaacaaattggaggtttagctgcgatatttaaagacgaagattatagtaaggcatggaaataatgaatgatttagaaaaagcagaagcattgatggcaagtaaaaaatatagattggctgacatttgtaaagctaccggcattcctttaaatacacttaaatcttactcatcaggtcgaagtcctttaaaaacggtagcatgggaaagagtttaccgattagctaggtactatgaaaaagttcaaggataatgtgctataattgatttagcttatagtatgtatgttaagttgacataataaaaaccgctcacagtttggatgtgggcggcttgaattttacataaaatagacgttggagcttcaaaattttaaagaggtctccgaaaaggtctccagtttcaaaattaataaaaatcagtaaaaactaaaaatgcataaatccaggagtagaaatcggtaaaaattaataaaaatcattactaaatccctcacattccgtaaatatatatgaattggaactatgttaacatagttcctttttttctacctaatttttcatatataatggagaaagggaggaaatatcgtgaagctacgaaaactaattccatttctatttttaatatctctattagctataacattttccgcttgttcgacaaagggagaagagaatacgaaactgtcaaattttttgtgtaaatagatctttctcgtagattgattttttaattatttatttaatcaaagtaggattctaaggtgtcctgaacctgaccaaagcctttgtggattcgattgaaatagcgttcgttgtagctcattgcttgaatgccaataaaagtatcaagcgactgttcagttggaaactctgccttaggcttagctttgcgcttgatcacattgttaaatgattcaatcatgttagtcgaataaattgaagctctgatctgcttgggatagttataaaagaccagcagatctggttctatgtctttcaagcttctgataacatggctgtaaaccttgccccatttggtatagaagtcatgcaggacagctgtggcttcttctttgtttgtctgttgatgcacctgtttgaattcgttcatgatcttttcacgatcgtcgacgcgtactttagcgcagatattgcgcatgacatgaaccaaacagcgttgaaaatgagctttaggataagtcctggccaaggctgttttcatgccaacaacaccatcagaaagaaaaagctcaacttgctttaagcctcgggatttcatgttttgaagcatatctgtccagacttcaatgttctcgctaggtgcaatgcagtagtcaatgacctccttgtgcccattaggcttgatgccaatggcaatatagactgcttcacgctcaaatgtttctcggcgcaaaggaaggtatgtcgcatccaaatagacgcagaaaaacttgtcgcttagcttgcgtttgtggtaagcctcaacctttggaatcatctgcttggaaatatttgatacctgagctggactgtaatggctgccatacattttttcaattagatcggctatttccctggtggtcacgcccttggaataaagcttgataatcatgctttccaagatatccgagtgctgcttgtagccaggcagcgtgtgctgatgaaattgactgttgcgatcccgaggcacttgcacttcaattgggccaaattgcgtatcaactttgcggaaataagcaccatttctagagttgccagtattccagccatttctggcataggggatcatagcccagaaaggcagtcaattcagcttctagcaagttattaacagcctgttgtagctctttgcgcaataaatcatttattttgtctggattgaatagagcttgagcaaaatctttggtaaaatcattcatgaaggagttcttctttctgtatgtgttttttgttcaaaccaatcatacgagaaaggaactcctttttctaatgtttaaagaaataaatttaaggaatcattcatccttacacaaactattttacggtctcgagaatactgctaagcatagagttaatattgtaacttctactaatatttatgcagatattgctaaaaatatagttggtaaacatggtcatgtacaagctattataaaaaacggcgatacagatccacatgattttgagcctacgactggctctgccaaagaagtagctaatgctaatattgttattgccaacggtctaggatatgatgactggatgactaatttagccaatgctaatgatattcatgtggttaaagttggtaatcaattgatgggattaaaacagggggataatcctcatatttggtataacttaaacatgcctaaaaagtatgttgattatctagttaaaacagcaagtaaaattgatccaaaacatgcagcatattttaagtctaatgctgcaagctatttgcaaaagattgatagtataaagaaaattgctgctaaaattaatgggcgtgaagataaaccggtttatgttagtgagcccgtgtttgattatgcactagaacggtgtcattttaagattggcaatcaggcatttgaagaagctgtagaaaatgaaacggatccgagtgcgcaagttattcatgagatgcaagtcaaaattaaagctagaaaaattgctttctttgttaataatattcaagcatcaagtagtacagttagtggcatggttaaactagcagagcaacataatattccagttctcgatgtaagagaaacaatgcctaatggaattagttattattactggatgaaagcgaattatcaaaaattatttgaaatttttttaaaataactattgcataattagggactatcaggtaatataataaacgttgtgattgagagatcacggtggtaataactaataaaaataaataaaaaaagttcttgacttttaaaacatgattagttattataataaagtgctcttgattaagagatatgacccgttggtcaagtggttaagacacggccctttcacggccgtaacatgggttcaaatcccgtacgggtcactaatggaggattagctcagctgggagagcatctgccttacaagcaggaggtcacaggttcgagccctgtatcctccattgttcgggactaccgccgcctcggtagtctttttttatgcaaaaagaacgaacaagcaaaattattattttatcggttcaagtcctgagaggattcactatgattagtgaagatgccttgtaaccgaatagccaatgtctatatagggggactaatatggaaagacgtttgtttacttcagaatcagtttctgaaggacatccggataaagttgctgatcagatttctgatgcaattttagatgcgatgttaaagaaggatcctaattcacacgtagcttgtgaaacgatcgtaactactgggatggtttttgtctttggtgaaatttctaccaacgcttatgttgatattcaagatgtagtgaggaagactattttgaagatcggctatgatcgtccagaattaggttttgatggcaataactgtgctgtgatggttgacatcgatgagcaatcacctgatattgctggtggggttgatcactcacttgaaactagagaaaacaagtctgataacgatgaattggatcaaattggtgctggtgaccaaggtttgatgtttggctttgcgattaaagagacacctgaactcatgccattaccaatttcgtttgctcatcgtttaatgagacgtgttgctgctttgagaaaagaccatactttagattggcttcgtccggatgctaaggctcaagttactgtagaatatgatgaaaataataagccattaagagtggatactattgttatctctactcaaactgatgcagaagtttctaatgaagaaatccatcgggcaatgattgatttagtcattaaggaagttattccggccaagtacctagatgaaaagactaagtttttgattaatccgtcagggcgttttgttattggaggtccaaagggcgattctggtttaactggtcgtaagattatcgttgatacttacggtggttacgctcgtcacggtggtggtgccttctcaggtaaggatcctacaaaggtggaccgttcagctagttatgcagctcgttatgtcgctaaaaatattgtggctgccggccttgcatatcgttgtgaagttcaacttgcttacgccatcggtgtggctcacccagtatcaatcatgatcgatactgccggcacaggtaaggttgacgatgaacttttaactgaagcagttcgcaacgtatttgatcttcgtccagccggcattattaagatgcttaacttgcgtcgtcctatctacgaacaaactgctgcatatggtcactttggcagaacagatgtcgatttaccatgggaaaagaccgataagactcaagatttgcttgattatattaaagatcatcaataaaaatattcgaggagtaaataataaatgaaaaaaacaaacgtgcctgtagtcacgcttgcgatttttatgacaacgtttatgaccgctattgaaggaacgatcgtttctactgcaatgcctacaatagtttcagaccttgatgggctagaaattatgaactgggttgtatcgatctttctgctgatgacggctgtttcgactcctttatacggaaaattggcggatagcattgggcggaagccagtttttttgtttggaattgcactttttgtcattggatcgtctttgtgtggcttagcgcaaaacatggttgaactgatattatttagagtaattcagggactaggttcaggagcggctcagccagttgcgatcaccattatcgctgacctttatactttgcaaaaacgcgctaaaatgttgggtcttagctctggtttctggggagtggcctcagttattgctccacttttaggtggttttattgtgcaacacctgtcttggcactgggtcttttatatcaatgtaccaataggaatcattgcgtttttattagtactagtgtatttgagagagcctaagcatagatctagttcaaaattggatttgcagggaacaatttggttagtattattgctttttgccttaatgttcttcttgcaggatcttggcagtagcatgaatttgctagttatggccactctagccgttttgattgtaatctctgtaattctattctttagagcagaaaaacgcgcagcggatccaataatgccgctctcgatgctgaaagacaaggaattctttgcattaaacattattacgctacttatttttggtgtagttattggatttgaattttatattccaacttggatgcaaggaattaatggtactaatgcctcacttgcaggatttgctgtaacgcctagttcattaatgtggattgtaggttcgttcttaattggcgggatgctaggccgctgggggattaaaaagacatatgattatatgttattggttttagttgtggccgatttggttttgattttagtgccgatttacacatcattctgggtcttctgtgttattgctgcctttaatgggaccgcctttggtgcgattacgacagcttcacaggtgagatcgcaggttttggtacctaaggatgacataggtgttgccacttcgtttaatacgctgatgaagtatctgggacagacaatgatggtttctatctacgggattgcttttaatacgatgttggcgcatgggttaagcaagagaccggggttgaatcaagaaatgatgaataaaattgtttctgcagaaaatgccaaaagtctggctgccaatgtagtgccacaattacggcaagttttgttaggcgggttaaaagctgtttacgttgtttctatgattgttattgtagtctcgattgtattgaatcaattgtatcgagatcgaaaattgaagaaaaattaagttgaaggagccacatgcaaagtagagcatgtggcttttttgtagaacttgtgattttataatttttaaaagaaaatatgaatttttaatttatataaaatacaaaatcaatattttgtaattaatattgaatttttatttcaaagagaatattatagttatgtaagggcttgcataaaaagccgtgaggtaaacaaatcaactattttctataaggagggtaagacgatggctgataaatattcagaattaggacgcgagatttatgcaaatatcggtggacctaataatgttaagtcaatgtatcattgcatgacacgcctaagaattaagatccgggataactctaaagtagatattcaaggcttgaaagatattgacggagttttaggcgtagtaaatgcggacacgttggaaattgtcctaggttctggggttaatgctaaagttgcacaagatatggttagccaagtgggagtgaaagaaaacgaagaattcccaaccagcacttaccagagcgaaaagtctgaagttcaagcaaaagctgcagaagtacatgctcaacataaggcacagttgaaacaaacatggtggcgtaaagctttaggccgtatttccgctatcttcattccacttattcctgcatttattggtgctggtttaatttcaggtgttgctggtatccttcgaaatatgttgacggctaagatgttgcctggtagctggaacttaggcgttactattctcagtatgattgctagtgcattgtttgcatatttgaacatttatgtaggtattaatactgctaaagaatttggagctactcctgctctaggtggtatcatcggcggtgttgttttgcttcctgggattgctgcaccggttactattccaaatgtattagatggtaagccgctagcagcaggccaaggtggtattattggtgttttacttgctgtatggcttttggcttatgtagaaaaatggttccataaacatattccagattccgtggatattatatttacgccgttctttactgtcctgattatgggactattcacagtatttgcaattatgccgattgctggttggatttctaattcattagtaggtggtattaattgggtgctcgatgttggtggtcctgttgctggattcatccttgggttgttcttcttaccaatggttatgctcggattacatcaaatccttacaccgatccatttatcaatgattcaaaaaatgggttatacaccattacttcctattctggcaatggctggtgctggtcaagttggtgctgcaattgccctttgggctaaatgtcgtaaaaacaaggatttagtaagattgattaaaggtgcgttacctgtaggtattttgggagttggtgaaccattaatttatggtgttactcttcctttaggtagaccatttattactgcctgtgttggtggtggtattggtggtgccgttgttgccgcatttggtcacgttggttcaattgctatcggtccttcaggtgttgctttaattccattaattgctaacaacatgtggtgggcatactgtattgggcttttatccgcatatgctggtggatttgttgcaacttatttctggggtgttcctaaagatgctattaaaggcaaagttgaaaatcctactcctgaagtttccgaaagaagagctgctgaaaagcatgctgataatttgaatatgcctagtgaaaaggctgaaatttcttttgaagctcctgtttcaggtgaattagaaaaaattgaagaagtaaaggatgacgttttttcacaaaagatgctaggtgatggctttgctattgatccttcaaatggtacagtggttgcgccagtagacggtaaaattgatacagtaatgaatactaaacatgcaattacattgaaaactagtaaagggaacttagatgttttaatgcatttaggattagatacagttgaattaaagggtgctccatttgaaattgacgttaaaccaggtgatctagttaatgctggtgaaaaaataggtacaatggatatcgctgcaattaaaaaggcaggaaaagacccagtggttttaactattattgctaatatggatcatattgatcaggtatcaaaagtagaagattcaccagttaaggcaggtcaagttgtctttaaggcaatgacaaaataatttttagaaagaaaatgatataaatgtcacttgaaaatttgactactgagcaacgaaataaaaatactatgcatattgattctatgtctacattagatatggtaaagacaatcaatgaagaggataaaaaagttgcagaagcagtaggaactcaagatgaagaaattgctcaagcgattgatattggctccgcacgttaccaacaaggcggcagattgatctatattggtgcaggaactagtggaagattaggtgttttagatgcggcggagcttgtcccaacctatggaattaaaccagaacgtgcaataggtttaattgctggcggtaaaggtgcaatgtatgtggctgtcgaaggagcagaagatgatcctaaattagcagctgaagaccttaaaaagcttgatttatcagaaaaagatgtagtgataggcttagcagctagtggtaggactccttatgtgattggtgggcttgattatgctcaaaaagttggtgcggctactattgcgattgcttgtgttaaacatagtttgattggtcaacatgcaaatattgcaattgaagctgttactggtgcagaagtaattacaggttctactagaatgaaggctggcactgcacaaaagatgattttaaatatgatttcaacagggattatgattcgccaaggtaaggtatatcaaaatgtaatgattgatgttttgccaacgaatgaaaagttagttgaacgtgctgaaagaatcattcaaactactacaaatgtttccttagaaaaagcagcaaaaattttgagggatgctgataaagatgttggtttagcaattgtaatggccaaaacgggtttgaaaaaaaatgatgcacaattgttgctgaaagaacatcagaataatgtaagtagtgtcttgaaagaagaatagatataaattaaggataaggaagagtggcagtaagtaatttaatttcgctgattgaagaaagaagacacattatgaatagcaagaagttaattactggaagttgtactgtagcattatcagtgatgatgttggcaagtactgttacatatgctcctattagtaactcacaggtgtatgcgagtgtggtaaaacaaaagcaagaaccaacaggtcaatatcaaattaatgatagttttcctattgatgaaaagaatgataatcccaaatttgatacttggtcattactagataatattaatcgaaagttttatggcttcaaaggtcaaggatcagtttgggtacacagtaataatgccaaaaattttgaattatatattaatgggaaaaatgttagtttaaaaaacattagtagtaataaatgggtaaaaattgatatcagtaaatttacaaaaaatggaaataatgctttacagatttcaccaaagaaaggtgttagagcaagcgataaatttgatattaaattaccttatcctacattagttgataaaactaaagaatatcggaataatgatacatttaaaactatggatgcactaattaattctgagattaagaatggatttccgtctgcagagttggttgttgtacataatggacaaatcattaagagaagtgcgtatggtagagtaaatgcatactttcaaaatggtaaacgccgtgttaatgctccaaaagttaccaatacaaccatgtatgatttagcttctaatactaaaatgtgggcaacaaatatggctatccagaagttggtttctgaaaagaaattaaatattgatgcaaaagtaagtagtatttttcctgactttaaagataatgctaatgataaaattaaaggcaagactgatttaactgtgcgtgatattttgatgcatcaagcaggttttccagccgatccacaatatcacaacaataactataatccggacaagcctaatgaacgaaagaagaatgccaaccctgtatatactcaaaatagagacgaagtattgaagaagataattgctactccattgcaatatgcgcctggaacaaaaacaatttattcagatgtagattatatgcttctggggttaataattgaaaaagtaacaggtcaacgagaagataattatgttgaaaataatatttataagccattaggcttgcgtcatttgatgtataacccattagataaaggcgtatctaaaaataaaattgcagccacagaattaaatggtaatactcgggatggacagattgattttaataatatacgtcactatacattgcaaggacaagttcatgatgaaaaagcatactatacaatgcatggagtaagcggtcatgcaggattgtttggcgatgcttcagatttagcggttttagcacaaatggtcattaatcgtggcggttatggtaatcacagaatatttgatgaagatactcttgatgaatttataaaacctaaatctacaaactatagttatggattaggttggagaagagaagcaagtactacttacagcggtaattatggatgggccttttcaggattgtccgatgcttcaactattggtcatacgggttggacaggtactttgaccgtagttgatccacacgataatactgcagttatcttgttaacaaatgaaagaaacactcctattcttaaacctgaaactactgctactgcaaatgactttgctggtggtcactatttgctatctaaatatggtgatattgccagtcttgcgttcgctgcaattaataaggacaattcatctgctaataatgccaagttaattagtcttacaatgcagagatttaacgaaattcaaaagaataaagatgatcaaacaaatgcagataaagcagacttatgtggaatttatgatgctttaaaaatgcgtagtaaaaagcataattctgtagcaagatttttagcgactacaaaaggaaagcaaattactgcatacgttaaggcaaataagaatgccgttaataatgttcgcaatagtcattaattaagaataaaagccattcaatatgaatgacttttattttattagggaggttagatgctaatgctaggaatatctgtatatttccaagattatgatgaaaactatttgaaaaaagcagctcaagctggtgcaaaatacgtttttacgtcacttcagattccagaagaagattattcagatctggatcaaaaattacctggattctttgaactgtgtaatgaattggggcttgaagtaattcccgatgtttctccagcaactttggaaaagctaggaattaaagaaggcgattttgaagctttaaaagataagggattcaaggctttaagattagattatggttttgataactttgatttaatcaaaaagctacaaaaaaaattctttattttattaaatgcaagtgttgtgtcactggattatttagatcgtgctagaaatgcaggagttgattttaataaattagctctaacgtacaatttctatccacatactgatacgggtatgggatggtcagattttaaacgtaaaaattggatgttgaaggattatggcttaaggactcaagcttttgttcctggggatgcacttaaacgtttcccactatatgaaggcttaccaactgtagaaaagcatcgtggagtttcaccttacgttgcagctgttgaattaattcatgaggcgaatgtagatgatgtgtttattggtgatagccaggcttcaatcaaaaatctccaatatattgtagattaccaaaaagagaagactttaaacttagaatgctctttattgccacagtatcaacaactgtatgatcaagtgatcgaagtaagaaaagatatgccagaaaagttgattcgattaagtttatctagaaagcctgatattccagtttgcaatactttaaataggcataggggtactattacaatgcaaaacaaattagctcaaagatatagtggtgaagttagtctgattaagtcaaatttacattttgaagcacgtagtaatgtaattggctttatttcacctgagtatgtgaagttgcttgattttattgattcgaatacaaaaattatttttagaaggctgacatagaagaaaggtgatattatgcttaatttggcgaataagatttcagatgtatatcctaatttgaataagacttctaagttaattgcagacgtttattttaaagaaccaagaatttttctaaataaaaatttacaggaattaggtaccattacccaaacgagtggtgcatcagtcgttcgcttttgcagaaatttgggctttaaaggttttaaggattttcaaatagcttgtgcgcaagaaatgcctaataaacaagatgctatggtagatacgattatcaatacaaatgatgaaccaacaagcgtgctttataaattgcaacttagcttaggaaaaaatattgcagacattggtaaaacaatagatcataaatctttagatgctgcagtagatttaatgcgatcagcacaacagatatatgttgcaggagaaggagcatctggtcttgctgctcaagatttgttttataaattaattcgtagcggaaagaatgttaatttcgttcaaagttcacatattgctttagaacaagtagcaaatattaataaagaagatatactaatcgttttttcctacagtggattaactcaagaaccattgctaatggcaaagcaggcgcaaaaaaataatgccaagatagttgcagtgactcgtatacaagattcaccactaaagaatatggctgatacagtaattacattgccatcaaatgagaagttattgcgctatggtgctattaattcactatttgcagaaatctttgcttctagcttgctatatttgagtcttatttcgccaaatttagaagaactaaatatgaaaatgaaaactacgcaaaatttgactaatcaattaaaagtgtagaatctataaaataacaactaaataaatttaaaaaaatcaaaaatattttcatgatgaaaataataaaaataaagaaaaaaaggaccagtttggtccttttttagtactttttttgcggttggaataaatctatatttgacaatgctataattataaatggaaagtggcctaaaaataagataacactattgaaagcgcattatttgcctccttgaaagtaaatctaagtagctgtacacttaaattgagctgaataacgaacgttatttttggcagagacttgtaatgcgagtaggaattatgggggcgtaaaaatggatattactagtttagcaagattccaatttgctatgacgacgatctttcactttttcttcgtgccattttcaattggtacgatattcgttgtcgcaattatggaatcaatgtatgttcatacaggcaagcctgaatataaaaagatgaccaagttttgggcaatgtcattaagttaagacattgacaaattgaatctaatctctgtagaaccgaatcattatgatttggttctttttttgcataaaataaaggcgaaaagaacctaccttttcgccctctgattaaattattaaaccttcaaaattattgccagaaagctggtgttaattatgaaagcccttcacagaaatattttagatcgtcttgatcaaattatcaatgatactggaaagcatattcatgattttatcgatgatcctcatgccttcactaggaagcggtttttagatgcagctacagtcattaaaactactattaatatgcaaggaaaagatttgaccagtgagttgtttagagcttttggccaaaaagctattaaaaataacgataaagtagtcagtacttccgcttatgtccaacgcaaaggtcagctttcacccgcatgttttaagcatattctaactgtatttaatcagaatttatttaatatccagttatttgatcataaatatcgtatatttgccattgatgggtctgattttaatcaaatctggaatcctaaatcagagaatatcgttggaaatctcaatcataaaggaaagccatattgccaaattcatgttaatgcactctatgacctgttaaataatacttatcaagactgcatctttcagcctaagtcaaagatggatgaacgtaaagccgccgttcaaatgcttaaaaagctaaattgcggaccatatatagttactatggatcgaggttataccggctttaacatgattgaaaattgtaatcgcctgcctaactgttattatgtcatacgtactaaaacgggatatggcgcatttaaggaagtagctgagttgcctaatcaagagtgtgataaggatatagcttgctgggtgactacctctaattattattatgaaacccataaggctacagaaaacgttcatttggttaaccatcattaccgtcaatatataaaatatcggtctaaaaataccaaagatggcagctgggactttggagagttatgtacaataaaatttcgtgcctgtaaatttagaattaatgatcctaaatcaggcaaagaagaatgggaagttgttctaactaatctaaatagagccgattatcccttaaaaaggatcaaagagatctaccatttgcgctggggcattgaaacttcattcaaaaagttgaaatatgctttaggtagcgtacagtttcattccaagcaggatagatttattgaaatggagatctatgcccacatgattatgtttaacgcagtcagtcaaattgatgctcaagcatatgtaccacaaaaaaactgcaagtatcaatatgcgatcaatttcaaacagtcatgttttgtcatccaggctatgtatataatttcttcttcaactgaaatctttaaaaagattcttattcaaattagtcattacacaattccgatcagaccaggacgaaaagacaaaagaaatctcaaacccaaatcagctgtatattatttatatcgtgtagcctaatttctaaacaaaatttgggtttatttggcatgaaaaaagatcattcaaatgcgataaatcacaaatgaatgatcttaaaagtccaagtcgataatttgtcaatgtcttaacttaatgacattgaagttttgggctaatatctttttattgagttttgccgttggtgttgtaaccggtatcattcaagaattccaatttggtatgaattggtccgattattctagattcatgggggacatctttggtgctccacttgcttttgaagcattgttgtcattctttattgaatctacctttattggtttgtggatgtttacttgggataaagtggggaagaaattacacttattctttggatggatgatcgtctttgggacaatgacttctgcattatggattttaacagcaaactccttcatgcagcatcccgtcggctttgctttacgcaacggtcgtgccgaaatggctgactttggagcacttcttaagaatccacaattaatgtatgaatatggtcacgtaattgttggtgcacttttaactggtactacaattttgactgggttagctgctttccaactattgaagaaacgtaacctttcagacattaacaagaagatctatcgtaagacaatgcgtttaggcttaatcttaatgttaattttctcagctggtgaaattgctgtgggtgatatgcaaatgcaatatactttgcatgatcaaccaatgaagttcgccgcaactgaagctgtttataagacaactggagaaaaggctccatggacggtagttgcaattgctaatccaaagacccatgaagttaagggaattgatattccagacatgttaagtattctttcttaccacaagactactggttctgtaaaaggtatggaagaaattaacaaagaacttgaaaagaagtatggtacacatattgatggtcgcaagatggactactatgtaccagttaatactttattctggtccttcagagtaatgtgtggttttgctgcagatggcaattgttggtttaatcatgactcgtaagaataaagaaaccctttataaccatcgttggctattatggatcttcgcacttcttacattctcaccattcttggctaacactgccggttggttaattaccgaacttggccgtgctccatggacagtttatggattatttactattgatcaaagtgtttcaccgaatgtttcagtggcttcacttttaacatcaaatattgtttacttctgcttatttactattttagcaattatcatgattgcattggttgttcgcttcatgcacaacgatccagatgaatatgataaggctcaagaggcaagcaaagtagttgatccgttctcaaagggggccatctaaaatgtcatttttacaaatactttggtttatcttaattggagtattgttctcaggcttcttcttccttgatggttttgactttggggtaggaatggccgtgaagactttagctcataatgaacctgaaagagatcaagttgttaggacaatcggaccagtttgggatggtaatgaagtttggttgattactgctggtggtgcaatgtttgcatcattcccatactggtatgcaaccttattctcaggttactatttaattttattattgatcttagttggcttaattattcgtggtgtgtcatttgaatttagagcaaaatgtgctccatatcaaaagcatatttgggataatgcaatggcgatcggtagcgtaatagccacctttctctttggggtaatgtttatctcaatgattaaagggatgccaatcgatgctaaaggtaatatttcagctagcttctttgactactttaactggttctcaatcgttggtggtattgctttaacacttctttgctatttacacggcttaaactatattactattaaaactaagggcgttatttcagatagagcacaaaactatgcacaagctttatactgggtactctacgtcggtgaagtggtctttgctttattattgattttccaaaccgacttcatgagagtacatccaattgcaactttaatatgtttagtattaattgtcggcttctctgtggcagcacatgtagctacctttatcaataagcaaggaatggctttagcttgcagtggattaactctgatctcattggttgcattaatcttctgtggcttattcccaagagtaatgatttcatcaatcagtagcaagtatgatttgcttattcatagtgcatcatcatctaactacactttgattgttatgactgttgctacttgcatcttggtaccatgtatcttggcttacaccatctgggcatattggatttttcgcaagcggatttcaatgccaagaatcggagaggttaaataatgattgataaacagctatttaaaattgatggcgctggttcaatcttaaaaaaacttgcagggcttgagattctgcaagctttttttatagtaggacaagccttggcactagcgtcagtcttaagcaaattgtgggcaggtgagtcactagactggctattgcttcttacttttgcggcatgctttattgctcgccagttaatcaatactttgcgtgactcaatgcttgaaaaatattctggtcaagttgcagaagagctgagacagaaacttttagataaagtctttcgtgatggtcaggctttagtccaaaaacaaggtactggtagtttgatcaccatgtcgttagatggtgtagatgaagtaagacaatatatcaaactgatctatagtaaagttttgacaatgatgattgtgccagttttaatctttgtcggcatgctttttttaagctggacatcagctgtgattctgctagtcatgtatcctttaattgtcttattcatgattatcctaggtcatgctgcacaggatcgagcaattaaacaatttggtaactttcaggttttatctaataactttattgattctttaaggggaattgatacgctgaagtatttaggcctgagtaaaagatattccaagtcaatttttaacttgagtgagggttttagaaaaaagacgatggcggtgctaaaagtagcaatgctttcaacttttgccttagactttttcactaccttgtctattgcaatcattgctgtttttcttggttttgacttgatgaatggtaaaattgcactttttcctgctttaggaattctgattctggcgccagattattttttgccaattcgagattttgcgggggatttccatgcaaccttgaatggtaaaaatgcctttaagcggatcaacgaattgattaatctgccagaggaaaaaactaatgatttatctttaaaaacttggtcagctcaagatcaattgaagatcaagaacttgaagtttacttatcaaaagggaaccgaaattggaccggtttcattacaagtccaaggattcaagaaaattggcattatcggaatgagcggatctggtaaaactagtttaattaacctgctcagcggctttttgactccggatcaagtgcaaattgaactacaagggcagaaaactacgaccatgaatattcctgcttggcagcgtcaaatgacctatattccgcaggagccatacgtttttactaagagcttgcgtgaaaatattgctttttataatccgcaggcaagtgatgatgaaattaagcaggcgattcatatcatgggtctggatgccttgttaaatgatttgcctaacggacttgatacggtgattggccgcggtaagcgtgtcttgtctggaggtcagtcacaaagaattgccttagcgagagcatttttggatcctaagcgaaaaattatgatcttcgatgagccgactgctcacttagatatcgaaacagaaattgacttaaagaagcggatgatgccattaatgcaaaataaactggtcttctttgcgactcacagactgcattggttaaaagaaatggactatattctagtgatggatcacggtcaattggttgagcaaggaagttatgagcaattgcagcaaaatcaaggctacttctgcaagttaatggcaggaatgagaggtgaaaacaatgatcaataagattccggttttaagagcattaaaaaatgatcgttgggttcgcccatatttggaaaaatatcgtaaaacgttgattttggcgattgcactgggcattttaactttcgtctgtggcgggggcttgatgttctgtgctggctatttaatcagccgttcagcagctaaacctgaaaatattttgttaatctatgtgccaattgtcttaactagagcatttgggattacgcggccagctgtccgttattttgagcggctggttagtcacaattgggtgctcaaaatgacctccaaatttagacaacagctttatgactcattggagcgcgatgcgactatttttaatagtaagtatcagctaggaaatattctgggacttttgtctgatgatgtcagccatattcaaaacttttacctaagaacgatctttccaatgtttgtatcttggggcttgtatgcaattatcgtaattggcttaggcatcatttccccactgatgggcatttggatgttgatcctgtttttcttgattatttttgctattcctatttggtcagtcttaatcaatggtgcgcggcaaagctatgaaaaaacggttcaagacaagctctacgttgatttgactgataatgtgatgggagtagatgactggattttgtctggccgcagcaaagaatacttggccttgcacgtcaatgatcaagataaatttttgcaaatcaacgcgaagatgaaaaaatttgatcgctggcgcgactttgttttacaaatcttctgggtgttggtaattgtgagcctagtaatttggggtgctgccagatttggcgggcgttcaacttattatactaattggattgcggcatttgctttggcattattcccgactgttgaggcttttgccagtttgccgactgctgctcaagagacgaatatctacaaagattcgcttaagcgtttgaataatttgccagctcctgatcggactaagcataaaccaatcaaattaaccgcaccgtttaatttagtattaactgatgtgcattatgcctaccctcaaactaataaagaggttttgcatgggatcaacttaaatatccatgatggtgaaaagattgctattttgggtcgtagtggtgcgggtaaaagtactttagctgccttgctcagaggtgatcgggtaccagctaaaggacacgtaactttaaatggaattgataccagcaagtttggcgatcaaatgtccaattactttagcatcatcaatcaaacgccatatttgttcaataccacgattgccaataatttgcggctaggtaatgaagatgccacagatgagcagctatgggacgttttgcgccgagtaggtttggccgagatggtgcaaaaattaacggatggccttgatactaaggtggatgaggcaggattacgcttttcaggtggtgaacgccatcgtttagccttagcgcgaatcttactgaagaatacgccaattgtcttacttgatgagccaacagttggcttggatccaattacggagcaagctgtaattaatatgtttattaaggaattatccggtaaaactttaatttggattacacaccacttgcaaggaattgatcagatggatcaagtaatttttattgaagatggacaaattaatatgcagggtacaccggaaaaattatggcagacagagccgcgttatcgtgaattgaaaaaggctgatttaggattatagaggttcattatgctaacgaataaagtgccagaacaagatgtgcatgacctatttactagggtcgcacctaagtatgatttgatgaataatattgttagtttagggattcaaaagagttggcgtaagaaatttttacggcagttagatttaaataaaaattctatttgcttagatttgtgttgtggtagcgctgattcaactattgatttgactaaaaaagctaaattagtgactggtctagattttaaccaggagatgttgaagattgcccaaaaaaagattcgtcaaaagcagctgcagtccaagataaagttgattgcaggggatgcaatgaatttaccttttgcggccaatagctttgattgtgtaactatttgttttggcctgcgtaatgtccctgacgctgttaagacgattcaggaaagctaccgcgtacttaagccgggcggacaatttgctgttttagaaatgtctcagcccactaatgcattagttaaattgggctggcaagcttattttaaaatttttccgtattttgctaagttgacacacggtaatatcaaggactaccagtatttgtcaaaaacaagtaaagaatttctctcggctgagcaattaaaaaagctacttgagcaaaatggttttactcgagtagcggttactaagttaacttacggtgcaggtgcgattcatttgggacgcaaagactaaagcgttcgattgactaatttacgcgtcatctttttgagcaagacggtcgcattagtttgcggcagttgggctaagttagctaatgcccgattagtgtattgttcagctaaggcatgagtttcttcaatgactgagctgtttagcaaaatcttttggatttgttcgatatcgtttttgctcatttgtcgctttttttcaagtagcggtactaattgctctcgtaattcctttttgctaagagctagcagaataggtagagagtagacgccggtagtcaaatcttctagcgttggcttgtttagctgcttgccgccagtgtaatcaagaatgtcgtcaacaatttgaaaagcaatgcctaagttttcaccaaaggaggctaaagcttgagtagtttgctcatctccattgccaaaatggcttccttcttcggcagctaaacgaaaaagtgcagctgtctttcctttaacattagttaagtagtcgttgaaatcttggcttaggttaaaacgttcagccatttggcctaattcaccagcaagtaaatggtgcattgtgtgagcatttttgatcatgtaatcttgttcggaaatggcgttcaaaattaggtcaaaaaagtgcgtaaaaagcaagtcgccagcgtaaactgcggtgtctttgccaaaacgggcttggatgctaattttaccgcggcgctcgtcagaatcgtcaatgatatcatcatgaattaatgaggccatatgcaaaatttcgattgatgaggcaagttgaataatttgttttgatacagtttcttttttgctagcaatttgagctgacaaaattagtaaactaggccgtaaatatttaccaccgttactagccatttcaaggagtgcatcttgcaagtctgaatatggagtgcggatggttgcctgaattaattgattaacttcttcaagcggtttacgaataagtggatatttttgccaaggttgagagttattcatgatagatttccttataatagagttaacagaatagtgatcctttgaaaggatgtggatcgatgtcattaagtgtatttttagaattaattgagattaaagcaaaaaccgctagtgtcattccctttttcttagggatgtgctacagcgtgtattattatcaccaggttaactggggatttgccctagtcttctgcattgcaatgctactatttaacatggtagtagatatgtttgataactactgtgattattatcacgcagatagcaagaattaccaagagaagactaacattatcgggcgagaaaatatttcacctaatttagttctgggattaattatttcctttagtcttattgcaattttattaggtttgtatctagtcgctaaagtaggcttgcctgtattgtggatgggcttgttctgttttatggttggttatttatattcatttggtccgcatcctatttctagcttgccactaggtgaattgttctctggtttcacaatgggcttcatgattgtcctgctcagtgtttatatcaatagttttcaagtctttgcttggaactgggccacaatcgggcgcattttcttattagccttagcagatgaattatggatttctaatttaatgctagctaataatttatgcgatgcccaagaggacgaagataatcatcgcaccacgattattcattttattggtaaaaaaggtggcttgattgcttttagtgtcaaaaatgttttagcatttttggtaatcttcctcctaccgttcttgggaattgctcctaagacggtttggttaacagtaataattgtaccgttcgtttataagcagaacaagatcttaattggcaagcaagttaagacagagacatttatcacaggagtaaaaacgttgctagttggttcactgacttacttaataacttactttttaggaattctattttagagaggttgaaaattatgaaaacagttgtagttttaggtgctggttttgccggcttgaaaacagttgtcgctttgcaaaagaagttgcgtgaacaagttaagattatcttagttgaccgtaatccataccactacgaaacaattcgcttatatgaagtggctactggtgaaattccctacactgggatgtcatatgaaattaatgatgtaattaatccgaagatgactactgtgattacggatgaagttgaaaaagttaatattgctgataaaacagttgagttaaaggatcatgctccacttaaatatgactattgtgttgttggcttaggctttaccttgagcaatatgggcattaaaggtgcaaccgaaaatgctttgccaatgagcaatgtaaaacaagctgaagctattcgcgaccacctttatgccgaaatgaaggcttatcgccaagaccatgattctaaacacctgtcagtagtaatttgtggggcaggttttcaagcaattgaattaggaaatgccattgccaaggttcgcccagaactagctcaaatggctggcgcccaaccagatgaaattaccatcagaatgattgatggttcgccacgtcttttgccaatgttccaaggtaaattgcttgattacgctttaaacacaattaagaaaaataaagtcgaaattattaagccagcttatgttaatgaagtaacctctacctcggttttgtataaaatggctaatgaaaaagacaatgctgagctgcaagaaattaaggcaggtactagaatctggatgatgggctttagtggcagtccagtaattgaggcatctggatttaagaaccgtcgtggtcgggtcatggttggtgatcatttaacagcgccagaaagtgatgatatctacgtcttaggcgatgtttcaagcgtcatggttcctggtaagaaatggccatatcctaacactggtcaattggctctttcaatggctaactacgctgcaaaagatattaagagcagaattatgggtcaaactagaccggataactatgcttaccatgacttaggtgtagtagttaacttgggtaattcagaagccgcaggattggcaatggggcatgcttttaaaggatactttgcagcaactcttaagaagattaccattgataagtcggttcttgaaactggtggtattaaagaaacaatggcgattggtcaatttgacttctatcactaaaattgaaaataaaagagaataaaaaatcacttcagtttgatttgatatgaaccccaaatttgggacatattattgaactgctttatttaaaaccatatttcgatattctatcggagtatggtttttttagtactgttttaattctttcatgattgtagtaattgaatgtattaggactaaagtgtgaagttgcgccattttatgccacaccaagaagacctgctattcaccacactatgggtggcttagtaatcgacactaaggctcatgttttaaataaggacggtcaaatcatcgctggtctttattcagcgggtgaaaatgctggtggtatccatgccggtaaccgtttaggaggaaattctttagcagatatctttacctttggtagaattgctgccaatactgcttatgaggataaacatgttaccgatgttattactggcgcttcgcagaaataaagatagagtataaaaaaatacagatatatcaatttaaatattggtatgtctgtatttctatttggagtcatttttccttaccttcgaataaaaacccatgatttctaattcttactaacaaaaataatagtaacttttttctaacttcccaaaaaaattttgcgacttttttgcgtaataaataatagaggataaatatcatcaaattatttaaggagaactttgcatgagcaaagagaaagaactaaatgtgtctgaagcattaggttttacggatgatttgatgtttcagattgttatgagagatccagagatctgtcgtatgttcttgaatgaggttctaccacatttggacattcaagatatcactgtccgcacgcaagaaaggattgcttttaaccaagaagataaagtttcgattcttgatgtcctgattacggatagcagaggcaggcgttacaatgtggaaatgcaggtcgcgcataaagcagacatggataaacgagccaggcaatacctgttcaagatgatggaagatggctttttacgacgaaaacaagaatatggcgagctgcacgctgcatatgtaatttttattctgccgtttgatcccaaaggaaaaggcttgaagcgatatacttttgtttatactgctaaggaagacccatcagttgaattaaatgacgattctgcgttaatatatttaaacacaaagggaacaaaaggcgagatcagacctgagcttgatgacctttatcgcatgattgaaggcaagccaacttcaaatggaaaactcgtcagtcgaattaaaaagtcgatgaacaattatcgtagaaccgaagaatggaggcaacacgtcatgaacacagaagaagtagcagaagcagcaaagcagcttggcatggaagaaggcatgcatgaggcaactgttgcagcaatccataaaacgattaacatgcttagaaggatgaagtgcagtcccaagcaaatcttgcaagaattagaacaagattatggcaatgaattttctgaagaagaactagcagactttgtgaaaaacgcctagtcgataagatataatgatagctgtgaagctatcattttttagataacgggggcttgatcatgaataatcctgaagaattacaacattttttagatgttctgctaaaagagagtaactttaccagagcagctaaagaattatatatttcccagccttatttaacgcagctaattggacgaattgagaaaaaattaggcactaagatcatcaaccgagatgagagaccctatacgttaactcctgcaggtctaatttactatcaatatttggagaatgtttcatataataagcagcaattagggcgcaagctggaggcatatactcatcctgaccaacagataattaaaatcggcattttggagagcttaggtacatatttattgccagaaattttgccgcaatttttgcaagaaaaccccaacgtcaagattcagctatttgaaaatttccccagagaaaatgaaagaagactgcttaatggcgagctggattgttatattggtcagacgccagaagcacttgactcgagtttagatgtggttgtgggtggcgaggaacgctattacgtagtgatttcgccagcctcaccatattaccaagcaggaaagtttatcttaaattcggatgaacttgatctaaaagaggtactgcaggagcctttagtgttgagttcacctggttcagctatccggcatcaagttaatggcttatttcagagattaagactcgaaaaaaatattgtgatggagtctaatagtattattactgcaactaacttggcaattcacggcgtgggtattaccatttcttcggcaagtattatcagaagaatggaacaaacgccaattaacttgttgccactagatcgaaagttaatggatgttgtctttttcattgctagcaaaagcggggaaaagtcgccagcgttagaaaacctaatttcaatttttcaaaagacgcatttacaagcaaaaataggataaagaaaaaggcatcatgcgatgccttttaaattgctttgatttctattgttttcgtttcatgtcgatcatcttcggctcaatgtagaagtgatagaggaaggaataaccaagcagtacaaaggtaattccttcaatccaaccgccgaatacatcagatggatagtgcacgtggacgaaaattctggtgtaaccaatcatcagtgggaataaagcccaaataataatcaataaagtcttccagaatttgcttctcactaaaagaatggttaggataatcaaaacaccaaatagcgccgcgctaccaactgagtgccccgatggaaaactataaccatccgcataaactaagtgcttgaccgttggacgctgccgcattactgcgtgtttgataatccaattatagccattagcacagatcatgacaccagcggtaaaccaagcgtatgcatattgcttaaagatcagtaaaactatgaaaacaatgattgtttcaattgtgatcacgcttgtattgccgagattagtaaaatctttagcaaaagcgacattagctggattattgttgcaaacaatgttgatcacagcattatcaaaattgtgaataaattgtgagccggatgaaacaagtgcggcccagacagcataaataaccacgaagcagataccaggtattaaggtgtccttaggtggtcgtttcgtattaatcaaaaaagtactcccctcttgtattttttagcatttgtggtaaattataatcattatctataagaaaataaaggtcgagaagtagtaacaagaatattttttcagagagaggctggctgctgtgaagtcttaaaataggattatgaactcgtctcgtgttgaagaaacctagcgttgccatccgcgttaaggagcaattaagtgtcacaaattgtgaaacttaggtggtaccgcgatgattcgtcctatgattttttcatagggcgttttttaatagtaaaggagaattattttgtataaccacaaagtagttgaaaagaaatggcaagattattgggcaaagcatgatacttttaagacaggcactgaccctgataagaagaattattatgcattggatatgttcccattcccatctggtaagggacttcacgtaggtcacccagaaggatatactgcaactgatatcgtttcaagaatgaagcgtgcacaaggctataatgtgcttcacccaatgggctgggatgcatttggtttaccaactgaacaatatgcattgaagactggtgaagatccagaagttgttactaagaacaacattgctaactttaagcgtcaattgaacaagttgggcttctcatatgattgggaccgtgaagtaaccacttcagatccaaattactacaagtggacgcaatgggtttttgaacaaatgtataaaaagggcttggcatatgaagctgaagttcctgttaactggtcaccggacttaggtactgttgtggctaatgaagaagttatcgatggtaaaactgaacgtggtggctacccagtatatcgtaagaatatgcgtcaatggatgcttaagatgactgcatatgccgatcgcttattagaagaccttgatgatttggattggccagaaccagttaaggaaatgcagcgtaactggatcggtcgttctgaaggtgcgcaagttactttcaaggtaaaagacagcgacaagacttttgatgtctttactactcgtcctgatactttatttggtgttagctatacagttcttgcaccagaaagcaagcttgttcaagaaattaccacacctgaacaaaaagaagcagttgatgcttacattaagaaaattgaatctaagtctgatcttgaaagaactgatttgaacaaagataaaactggtgtcttcactggtgcctatgcaattaacccagttaatggcaaggaagtgccaatttggatttctgactacgttttagctagctacggcactggtgcagttatggctgttccagctcatgatgatcgtgactatgcttttgctactaagtttggtttgccagttaacccagttattgaaggtggcgatattgaaaaggaagccttcacaggtaatggcaagcacttcaattctgagttcttagacggcttggataatgaagaagctaaaaagcgcatgattgaatggcttgaagaccataactgtggtaagaagaaggttaactacaagttgcgtgactgggacttcagtcgtcaacgttactggggcgaaccaattcctgttattcactgggaagatggtactacttcattagttccagaagatcaattaccacttcgtttgccacatgcaactgatattaagccatcaggtacaccagaaagcccacttgctaacctaactgattgggtaaatgtagttgatgaaaatgggcgtaagggtaagcgtgaaaccaatactatgcctaactgggctggttcaagttggtactacttgcgttatgttgatccacataatgacaaagaattagctgactatgatcttttgaagaaatggcttccggttgacctttacattggtggggcagaacacgccgtacgtcacttgctctatgctagattctggcacaaggttctttacgacttgggtgttgtaccaaccaaggaaccattccaaagactttacaatcaaggtttgatcttaaagaaccatgaaaagatgtctaagtccaagggcaatgtggttaacccagatgacgtgattgatgaatacggtgcagattcacttagaatgtatgaaatgttcatgggtccacttgatgcatcaatcgactgggacgataatggtcctgcttcaactaagaagttcttggaccgtgtatggcgtctctttgtaaatgaccttgacttgaaggcaattccacaagaaagaatcgttgataagaacgacggtgaattagacaaggtttatgcagaaactgttaagaaggttactgaagactttgatgcattgcacttcaacactgcaatcagtcaaatgatggtctttatgaacgctgctcaaaaagctaaaactattccacgggaatatgcggaaggctttgtaaagctattagcaccagttgctccacacatgatggaagaaatctggcaagtctttggccatgacgaatcaattacctatgctaagtggccaacttacgatccagctaaattagttgaatcaactgttgaaattatggttcaagttaatggtaagcttcgtggtaagttccaagctcctaaggatgcagatcgtgatgatctccaaaaacaagcaatggaaatcgaacacgtcaagaagttcttagaaggtaaagacgtcaaaaaagttattgttgttccaaacaagatcgttaatatcgttgctaaataagttaaatttttcctaaaagaacagtagaactttactttattgttcaaattgcgtgacaattaattagttaatacttatattgggaaaaatttcatggaagaagaaaacaacttaaatagcaaagatacacaaaatacttttctaaaagggtctgcttggatgacctttggctcgattgcctcaagaattttgggtgctttgtatattattccgtggtatgcctggatgggaccctacggaaatattgcaaatgccttaactgcacgaagttataatatctacacgatttttattctaatttcaacggcaggaattccaggagcgattgctaagcaggttgccaaatataatgccttaaatgaatacggcattggacgaaaattattccgtaaaggtttaattttgatgactattttaggcatcgtctcggcggcaattatgtattttgcttcgccgctactagcgtctaatggtagtcagagtgatccgaggcaagttgcggttatgcggagcttgtcttatgcgattttaattattccgatcttaagtatcatgcggggttacttccagggatatgccgacatgatgccgagtgcgatgtcacaatttgtggagcagtttgcgcgggtagtctggatgctgttaaccgcatttgtgattatgcaaatgcagcacggttcctacgttcatgcagttattcaatctaatttggctgccgctgttggggcactttttggaattggattgctagtttggtttttgctttccagaagagagcgactggactacttggtggcccattcaaataatcgtttgcgagtttcaaccactgatttatttggtgaaattattgctcaagcaattccatttatcattattgattcgggaattaccttgttctcattggttgatcaatacacattccaccctatgattgctagcttagttcatgcaagctcagatacaatcgaagattggtacgctttatttggcttgaatgccaataaattaattatgatcatcgtctcattagctagtgctatggcggtaacagctattccgttactatcggctgcgcatactagaggagactacaagagtatttcaagtcagattgccaatacgatggacttgttcttgtttgtcatgattccagctgcctttgggatggcggcaattagtaaaccaatgtacacgattttttacggaccagatccattaggcagcaatgtcttatatatatctgcatttacggcgattagcttaggtttgtttacggtattaatggcaattttgcagggtttatcagaaaatggcttagcgattaaatatttgatcttaggcttgattctgaagggaattttacaatatccgatgatctttttattcaagatctacggtccgctagttgcgactaacttgggtttgttggtcattgtattcctatcactgaagcatttggaagttcaatataatttcaatttgaatcgaactagtcgtaggctaatgggagttaccgcattttcaatcgggatgttcctgattgtaaaattagtcgaaataggcttaggtaagttcttgagtccagagcgaagaattccggcattattcctggtaatcttttctgtgggagtgggcgtgatcttttatggtttcgtcaccttgaagacagatttagcacaaaagattcttggtagcaaaattgaaagtattttagtaaaatttcacatccatgactaaaaataaaagtcactacagatcaaaattatgatctatagtggcttttttagtgcgttggatcctgcgtgccaatccattactaataattttaggagtgctacttaaaatttaagaattagtcaggcgtaatcgccgttaaaacaaagaccccgattagttcaagtgctaagaatgtaataccgatagaagcaatcatgattctccatctcctcatcttagagataaatattgagatttatcttttctaatcacgtttattctttacgcttttactgtaacacataatctagtgaaacgaaagcggtttcatgaaagcgagagaaaaaagttgattcccgaagaaatcaactttgtgcccctgccaaggacctacattatagcattcatttattcttggttgtcgtcttttttttcgtcagaatctgaactagaatcatctgacttggtaaaatcaccgttcattgtattaggacgaccagtttgataatcagtagtgtgtttttcggctttaggtgcaatttggccaggttctggcatgaccattgcagcgatgatatataaagcaataccagggaagataccagtgaataaaattaaggcggcaccgatgattcttacccaagctgggtcaagatcgaagtaattggcgattccgcccaaaacgccagctaaaattttgttttgtgatttagtaagtctctttttcatagtaatcaactcatttctaaatttgatgtccttcaatgtgtattatacagcagagattaataaaattaagagctataaattctattattaaaaaataaaaaaagtgttgatctctcaacacttacacataattatgatgcccgctaaaggattcgaaccttcacttagtcacctaaacagcgacctgaacgctgcgcgtctgccaattccgccaagcgggcatttttattagctacatgaataataataccaaatatttggtaaaatgtaagcataaaatactttaattatacaaaaggatggaatttcatgttttttagtaaaaaaataaaacgtgtagcaattacaactgttgcagctgtatcaatcttttcgtgcggtgcagtttttgcgactacgcctgttaacgcagatacaactagtagctatcaagctgatcaagttaaactaaatgtaaagtcagcaattgcaattgatagtgattcaggtcaaattttgtatgccaaaaatgcgactaaaactttgccaattgcttcgatgactaaattagtaacagtttatttaactctgcaagcaataaaaaatcataagctttcatgggatcagaaagtaaagccaacggctccgatagtaaaggtagctaataatgcagaatattcgaatgtaccattaaaactaggacattcgtatacgataagacaactttatcaagcaaccttaattgaatcagctaatggtgccgctatgttgcttggtcaaactattgcgggctctcagaaggcctttgtggaccaaatgcgtgctcaagtgaagaagtggggcattgaagacactaagatttataccgcatgtggtttgcctaatggcaatgttggtaaagatgcatatcccggtgtaaataaaaacgcagaaaattctatgtcagccaaagatatggcaattgtagggcaaaatttaattaaagattttccggaagttttggatactaccaagttagctcacttagacttcaaagatgccggtcacgctaccaagatggctaacttcaactggatgttaaaaggtctttcacaatatgacccagcttatccagttgatggtttaaagaccgggactactgatgctgcaggggcttgttttatcggaactgtgcaacacaatggtgctcgtttgatcaccgtagtaatgggtgcacgtcaccgtgatggtactgacccagcaagatttatgcaaaccaagaagttaatgaactttatttttaccaaataccgtcctgttacgatgactgcaggtagccaaatgaatggtgccaaaactattaaggtaactgatggtgataacgcaacaactaacttgggtctaaagaacaagactactatttgggatccagcagatggcaaaactttggttgcatcattaaacaagaagacagttgaagccccaattaagaaggatcaaacaattggtgactatcaatttaaatctggtaatgaaaagattgtttcattgtctaatcctaatgggatgaacgtcaaggctaaggcattgtcagctaataacaaggtgaacttttttgtcagaatttggcgctggattttcggaggaagataaatatgactgaaatttctgaagatatcttgaaaaaggtaattaaagaaagagaaagcgatacacataaaggcgattacggtcgtgtactcttgatcggtggtagtgagaactatggtggcgctattattatgtctaccgaaggcgctattaatgctggcacaggtttgactgctgttgcaacacaccctttgaatttagcatcgctacatgcacgagtgcctgaagcaatgtttatcaactggcgtgatgctaagctagcagatttaattaaaaacacggacgtcgtaatttgcggtccagggttagggatgagtgatctcgctaaacaaattttagttatcttaagaagatgcacttcagaaaaacaaacagtcgtcttagatgccagtgctcttgatttaattagtcaggataagaacttattgccaactaatgctggccacttaatcttgacgccgcatcaaatggaatggcaacgattgagtcaaattcgtattccgtttcaaacagatagtgccaatattgatgctttaaaccaattgattccagatactaatgcgcttttagtactcaaatcgaatcatactcatgtttataatgggactggtcaaatttttgttaatccaattggcaatccaggcatggccactggtggaatgggtgatactttagcaggaatcatcggtgggatggttgctcaatttggcccaggcgttgaaaccgttcaatctgctgtctatcttcattctttagcaggtgacttgcttgccaaagataattatgtggtacgaccaacggaactttctaaagtattgcctaaattgatgaaaaagtattgcctaaattgatgaaaaagtattcagaattggcataaacatgttaaaattctaatagtaaataaatgcatccctagttgagggatgttttttaacgcttcaaagacgaaaaagcataatataattgagttaaatattaataaaaaagaagattaacatattcatgaaaaaaaacattattatcggcgtaactagtatcgttctagcttttggtgcaattatcggcttagctaaggtatgcgcacctaagtctgatgtctcacaagaagctgctacaacgcagactaaggccaaaactaagaaaataaataaaattaagaaaaaacaagctaaaaaagtagataatggtgctttatatcgaccatatagcgatcctaaggacttgcgcaaggcaggcacttggaagaaaaagagtgagcctaaaaaatatcctaagattaagccgtatgaaaaggatttgactttgcgggtatcattaaaaggaaaccggacctatttgttaagaaaaggcaaggttttgtataccatgttatcaactggtggaatctacaagaagggcaagtcattgaccccaactggaacttttaggatccaaaatggtcgtggagacagctttttcaattataacttaggtgaaggagctaataattggactagttggagtcctgataacgtgtacttgttccactctgtgccaactaaagctgattatagctataacttaaaagaagcagccaaattgggaagaactcaaggttcacatggttgtatccgtttgagtgtacctgattctaagtggattatggatcacatcccagatggtacgaaggtagtcattaaaaataattaacaagaacgttgctttttaagcaacgttttttaaaaaattgcagtaaaaaactttgttcaaagcgttcaagattttaatccaactcaagaatggcttttttaactaaattagtggcagaagccgttttttcctgctataatcatgtttgccaagaagtcaaaagtagtagttattttctttttaagcgagtctatgttggtgcaagatagatactagaagataatgaaggcgtgtttgactgataaaatcaagaatttaaataagcggatactttgtatcaatctgagtggtaccgcgggtttttaactcgtctctttctacatttgtagaaggagacttttttatttagaagagaggaataagatggactttaagaatgaagtagttgacttggttgctagtcaagttgatttacctaaagaaaaaattgctgcattaattgaacgccctaaaaatgctaagatgggagactatgctttcccagcatttattttggctaagactttgcacaaaaatcctgcagaaattgctaaaaatattgcggataacttatcaagtgataatttcgctaatatccaagcagtcggtccttacgttaactttgcgattgatcatgaaaaattagtttcatcgactttgaaggatgttttgactgaaaaagaacattatggtgatcaaaagattggtgaaggaaatgtgccaattgatatgtctagccctaacattgctaagccaatgtcaatgggccaccttcgttcaactgtaattggtaattcaattgctaagacaatggagaaggttggctatactcctattaaaatcaattacttaggtgactatggtactcaatttggtaagttgattgctgcctacaagcactggggtaatgaagaagacgttaaaaaagatccgattatgaatcttttccactactatgtaaagttccaccaagaagctgagaaaaatcccgaacttgataatgaaggtcgtgaatggttcaagaaacttgaagacggggatccagaagcagttaaactatggaaatggttccgtgaggtttcattaaaagacttcaagcgaatttataaagaactaggcgtaacttttgattcatacaatggtgaagctttctttaacgataagatgcaaccagtaattgatgaattaaaagaaaaaggtcttcttcatgaatcacgtggtgcgcaagttgttgacatgggtgaaggtgaaaatcctgctattatcgttaaatctgatggtacttcaatttacttaactcgtgacctcgccgctgctgaatggagaatgaaagaatataacttcgttaagatgctttatgttgtaggtaacgagcaagcccaacactttgttgaattgaagactgttttgaaaaagatgggttatgactgggctgatgaaattcaccacgtaccatttggtttaatcacccaaggtggtaaaaagttatctactagaaaaggtaacgttgtcttcctcgatcaagtattaaaggatgctgtttcacttgctaaaaaacaaattcaagaaaagaatccagatttagcagatcaagatcaagttgctcatgatgttggtgttggtgccgttgtcttccacgatttgaagaatgatcgtttagacaattttgactttgacctagaagaagttgtgcgttttgaaggcgatactggtccttatgttcaatacactaatgctcgggcacaaagcgtcttacgtaaggctgctgcgatgggtgaaaatcctagcgaaactgatctagctcttgatgatgactgggcttttgccgtagccaaagatttagcagatttcccaagaattgtagctagaagtgccgaaaagtttgaaccttcagtaatagctaagtttgccttagatttagctaaaaaattcaataagtactatgctaatgtgaagattttaaccaaggacgataaaattggtgctcgtctcgccttagttcaagcaacatcaatcgttttaacggaatcacttagattgttaggtgtcaatgctcctaaagaaatgtaagagaaaaacaatgaaaataagaaaataacgcttacattctgtgaaaaattgttcatatttcaattattagggtacaataggcatgtaagatatttaggaggtattttttaatggcttattttgacaacggtaatcaaatctttaaagatgctcgtaagaaccattacgctgtaggtgcttacaacactaacaacttggaatggactcgtgcagaattacgtgctgctgaagaaactagaactccattgttgatccaagtatcaactggtgctgctaagtacatgggtggttacaagttcgttaaggacatggtagctgaccaaatggattcaatgaacatctcagttccagttatcttgaacttggaccacggtgactttgaatcagctaaggaatgtattgcacttggttactcatcagttatgtttgatggtcacgcacttccaactgacgaaaacttggaaaagactaaggaaatcatcaagttagcacatgaacgtggtatttcagttgaagctgaaattggtaagatcggtgaaaaccaaggcggcggtgaattagcttctgttgaagatgctaagaagttcgttgcagctggtgttgacaagcttgcttgtggtattggtaacatccacggtgtatacccagcagactggaagggcttaaacttcgaccgtcttaaggaaattgctgaagcagttcctgacactccacttgtacttcacggtggttcaggtattcctgaagaccaagttaagaaggctattaagcttggtattgctaagataaacatcaacactgaattccaattagcattccaagaagctactcgtaagtacatcgaagacgaaaaggaccttgacaagaaggctaagggttacgacccacgtaagttgttattgccaggtgcagaagcaattaccgccaagatgaaggaaatgatttcttggatgggtaccaagactatcgatgacgaacttaaggatgcttcattcgaccgttcatcattgaacgaagaataatcatttgataattatttaaataaagtctagcgtttgctaggctttattttgttaggcaaatttggtgataacttaattgaacctattataaaagaaatataaaataaaaaattgaattataaagaaagtataaaaagcccggatttaaaattgaagtgcaacactaagtgttaaacaaaaaggccatgaagacctaaacttgaagtgacgaaaaatcaagaaaggaagatctttatgaccaattcaaattctagcatttctaagcactatcatcaattaaccagcgtacaacgtggacaaattcaagcaatgctggattccggcataacttcccgtactgttatcgctcaagaagtcggctgccataagtcgacaatcagtcgcgaaatcaaacgcggaagtgtcctgcaaagagacagcagctatttattgtatgagcactattacgctgatactgcacagatttattatgagaagcgtcgcaaaaactgctatcagcgcaatccattgaagcattatgctgtctttttgagaatgctctccagacgctttaaagctaaatttgatgccaccagcatcgatgagttcgttggtgaattcaaaaggactatgccaggctacccttgtcccagcacaccaaccgtctatcgctatattgatcagggcttgctggacataagcaatattgatctgcctatgaagctcaaaagacgcaggaacaagcgtcatcacagccatggcggtcacgctttgcacaagaagcatcttggcaattccattgaacagcgtcctaaagagattgaagacagaaaagctccgctgcactgggaaggagatctggttaaaggcgtcagacgcaagaatcagcctgctttaatgactttgactgaaagaaccacacgctttgaagtagttatcaagattcctgactatcgggcaagcacatgccaaaggctgcttcaaaaggagattgacagacatcctgcctggtttaaatcaatcacgtttgacaatggctctgagtttgcggatatgaccaagatcaagggctgccagatttactttgctcacccatattctccatgggaaaggggcaccaatgagaactgcaatggtcttttgcgtcaattcttccctaagggcaagagcatgaaagacaagtcaaaagcttatgttcaacaggcaactgatgccattaaccacaaatatcgccgaatcctccaatatcacacagcagaggaactcttcaagcaatatatctcttcataacctaactgttgcacttaatttgacaattcaggaaagtataaaaagagacttttatggaagaaaaaatgttaaatccatttatgcctagctttggtcgttttcctaaaattattattgatcagcaagaggcattaactgattacttaactggcttacaaacgcacgatgctaagtatcaaacttctttagtctatggcacaaggggatctggaaaaactgtttttcttttaaatgtgcagagatctttagcaaagctagataattggatatttattcgtttaaataatggtcaaggaaatttgctttttcaattaatgcatggtttgcaacgagttgcaggtatttcgttagttgacttgttaaaaagtgttaaaagtttgaatattatgggaaagggaattacttggcaagcactacaagaatcacagcaaattgattatgatgagtatatttcaattttgctaagtcgattaaagaaacaggggaaatcaattttaatcggaatagatgaaattgaaattagtgatgatgttcgagcttttggatcagaatatcaaacattgattggtgatgaataagatatttcattattgatgacaggattgccaagcagaatatccgaagtacagtatgataataccctcacgtttttactacgtagtaatcgtgtttatttatcaccgttggataaaaaaacaatagctaatagctatgagaaagcatttactaaaggaaaacgtgaaattgatttcatggtattggatgaaatgagccgtgcagttaaaggctatgcttatgcctttcaaacgattggttattatgcttggcgatttagtcgggaattattgcagttaaacgaagaagttttgaaacaaacaattcgagctgcaaaaaaggacctttttaggaatgcctatgaaagaatgtatatggatctttccaaaaatgatcgcgattttatcgaagcaataatcaaagctggaaccgatcgtgtcacgacaaaacaattgcaagatatcttaaacaagccgattaattacatttcggtatatcgagcaaggctgttagatgaccaattgattacatcccctcaaagaggagtagtacaattggcgttgccattttttgcagagtttgttgaaaaatctaatttagaacatttatcttagaaaatgagcaaatataataaattatggcaatatatcaaagataataaggctggggactttgagctttcttttgatgagcttggccagcaggctggggttgccttagatcattcctttttgcgttataaaaaagaattaccagcttatggctttgaggtgcaaaaaatttcattgaagaataaagtggtgaagtttcatcagttgtaatgaaagctattaataactaaagtagtagtttgcgataatatcttcaaaattagtaactatgttttgttttagaaaaagactaagatgtaagtaaaaaatgggaggattaataagttactatgaagaaggttttatcttggccagtatattatcaactatcagagatttatacggcgccattaaatgtaatttggtttgtctttggcgcggcaatgtcgtttcaacaatatcacatgtttaatttgattaacattttactgtgcttagtagatgtttttctgtttgatttagcagttaatattgctgataattactatgattatcttcatggcaaagatcgacattttttgactgatataaatccaattggtcgtctgaagttacctttaactgatgttagaaacttagtgtggattagttactttatttcggcgattccgggtattattttggtttatcgcaccggctggccagtactaataatgggagttgtaggatatttcattggaatattttacactgcgggtcctaagccactgaatgcaacaccgatctgtgaattagtggtatctttttttatttcgtatttcattatgctagtaagcatctatgtcacaatttacggcacttatcctttgacctggaacttagcattaactactctgataagatgtttgcctttaacactcattttctatgctttgcagttagctaataatacttgtgatttgcatgaagatttaaacaatgggcgccatactttagccagttatactggtaaaaaatatgctcttaaaataattaagacgttgattattgcgggattattatttccaattatcgttgttctttttggtttagcaaaatggccattgatctttagttgttttttgttgccaatattatggcaaaaattaaaacaattttttgagcatccggataaacaaactacctatttacaaatgattaagtatttatcaatatttttcattacatatatagctatttatacagttttggtggagactgtaaaatagtttgtgtaaggatgaatgattccttaaatttatttctttaaacattagaaaaaggagttcctttctcgtatgattggtttgaacaaaaaaacacatacagaaagaagaactccttcatgaatgattttaccaaagattttgctcaagctctattcaatccagacaaaagtaagtgtcaatgtttttgcggtagcctttaaaccattagtctaaccttaatttcttaaatatttatatgacttaaatttctgcttagcttgcttaaataactattgccaactacctgtgcggttaatgcgccatgctggatgcctaaatgaacttcatgacgcttctttaagctgtcacgggccgctgcttttaattcctgttcagtcaatacagttatttctgaatcttcaaactcgctgctaagccaaaattccagctctcgattcttgatgcagcttaagatcctaagcatgccttctgctccagattttgaccatttcttgctttgccccttaacacggtaggtatacttgcggtggttgctctcgcagcagccaatggctttagtcacagtcagttttcgtttcttaaacggcttaatatcgtcccaatgacgatcaatataattccttaggcgccccagataatcatgattgagctcggtattcaattcatcaattagtcggctttctgcagtggttaggatagttttaactttgtcatagctgtatttgtattccaaagcagaaatcagcttgccttgcaggtcaggcgcaaaatatagcctttctttgattttcttatttaggtgaaagacatccaagaaatgctcatgacgcttgcatagccctacaatgtcatcgaagtctgttttggcatatccagcaccgccatcggcgttgctaagaattacagtatcagaaagatcataagtattggccaggtactccttggcttcgttcagcgcatcaagtcggcttaaagaaacaaattccttggcattgattcgctttctgcgtttcttgcttatattgacaatgccttcacagacctgatagcgatgaaattccaaccggcttttagtgcctttgatcaccacgccatcgccttcaagatacaaaactgggacctttttcttagtgcctgcggcatcatatcttgaatctgcttcttggcccgctttaatatttttcccggccatttttaccaaattgcccacctgcatatggctaatattaaagccagacaggcaattgactgctagagcagtattgcgataagtggcaacgctgcttacttctaagatgtttttgactgctaaaatactgtagcgcttgtatttgtcaaagcccattaattcatccaagggataccttgcttgtttgcctgggcagacatatcttcttctgacatacctaacttcgccaaaagccatattgattgagcgctcattcttcttatcaatctgatagccctgtgctttaaccttggtaatcatttcatcatcaactttagctaaagccaaggccatgatttccttaatcaggtttaagaagaaacagattatttttctttcacgcttaatataattatcttcagactttataatatttgcgatttcagttacaattgaattcataaaagaccagcttctaatgtgttttttgttcttaacatcagactactggtctttttgtttgagctcaagtccaaattcaaaggacttgggcttttttaattatttattcaacttaccgtaaaaaattatacacttagcagacaaaataaatgatttattgcgcaaagagctacaacaggctgttaataacttgttagaagctgaattgactgcctttctgggctatgattcctatgccagaaatggctggaatactggcaactctagaaatggtgcttatttccgcaaagttgatacgcaatttggcccaattgaagtgcaagtgccccgggatcgcaacggtcaatttcatcagcacacgctgcctgactacaagcagcactcggatatcttggaaagcatgattatcaagctttactccaagggcgtgaccaccagggaaatagccgatctaattgaaaagatgtatggcagccattacagtccagctcaggtatcaaatatttccaagcagatgattccaaaggttgaggcttaccacaaacgcaagctaagcgacaagtttttctgcgtctatttggatgcgacataccttcctttgcgccgagaaacatttgagcgtgaagcagtctatattgccattggcatcaagcctaatgggcacaaggaggtcattgactactgcattgcacctagcgagaacattgaagtctggacagatatgcttcaaaacatgaaatcccgaggcttaaagcaagttgagctttttctttctgatggtgttgttggcatgaaaacagccttggccaggacttatcctaaagctcattttcaacgctgtttggttcatgtcatgcgcaatatctgcgctaaagtacgcgtcgacgatcgtgaaaagatcatgaacgaattcaaacaggtgcatcaacagacaaacaaagaagaagccacagctgtcctgcatgacttctataccaaatggggcaaggtttacagccatgttatcagaagcttgaaagacatagaaccagatctgctggtcttttataactatcccaagcagatcagagcttcaatttattcgactaacatgattgaatcatttaacaatgtgatcaagcgcaaagctaagcctaaggcagagtttccaactgaacagtcgcttgatgcttttattggcattcaggcaatgagctacaatgaccgttatttcaatcgaattcataaaggctttggtcaggttcaggacaccttagaatcctactttgattaaataaataattaaaaaatcaatttacgagaaagatctatttacacaaaagatttgacagtttccaggattgcattactatagtttatgtaagttatgaataggtagtaagtaacttatgaatttcaagatattcattgatttaatgaggagaacgaaaatgaaaattttcaacaagaaaaacttattattgtcatctgcagttgttgcagggatgctattcacagttggtactaaggctgttcaagctgatacaaccgatagttcacaacaagcaactacaaatactttaaaggtaaatgcaaatactgcagttccagataagaatttgattacgccagtagctagccgtgataatcaaactcttcgtcaagttgcagaagcaaacaacacttcattaagtgtattggaaaagttgaatgataatattgatccagataaaaccattgctaatggcacgccattatatcttccacaaaatgaagatttgtcaggactatttggtatatatcttagatcagatacttcagttccaagctcattaaagagaaaatattatgatagtctttcagcaaaagagagagctgctaagatgtggattattgcacgtgaatctggtggaaattacaatgcaagaaatggtatctatattgggcgttttcaattaacaaatacttatttaaacggaaattatagcaaagcaaatcaagaaaaaacagccttacgatatgttaagggacgttatggttcatggtcggcggctaaaagattttggcaggctcacaactggtattaataaataaacggaaagtggaaaaaatgaaatttcaaaaattagtaactagtgtattattagtagctagtaccactggtgtattaatgactgcacctaaacgggttcaagctgtagctgataccaatactactgagagtggaaaacccgtcgcaaatattgttaataagcctaacctaacaaaacaaggttatgtgttaactattcaagccccatcagggaagatttatgtagggcaaaagaattacaagaaacaattaactactactaagccaatatctaacgcaaaatcagttagttggaagaaaattaaaaacgttagatttagaattgaaaaagttgcttatgcgacaaaggttataaaatttggtggagcaccacagtatctgcttgtctctaaagataaaaaatatagttgctggacaacgcgttattctattaaatactatttttggaatactaaaaagatgcaacaagtaattaagccattgtctaaattgacaactagaaactcttcaagcctaaagaagattcggaataagcaagattttaatcaagctgtattagctgctaaaagattacctgctaatcaaagaaaagttgtcttagaatctttgaatcaagtgaaaaaagttggcaatattgataaggctgaagataatattttgttgttcagcttttagtgatatttctagcacagatttaaaattaatataaaactgaagttagaagaatttatttaatgttgagggggaagaaattgtgagaagtatatctaaaggcattgtatctttgatagcagctacaatgttattagcagcaggggaagggatagttcctaatactgttaatgcttctatgctagattcggctaaaagtagccagaatagtcaagaaagtagtagatacacttggcagagtgttaagctaacagatggaactgaaatgcaaattcttccagataattcttcaaaattagctggaaagattaaatataacggtcaaatatattcatatcgcattgtttcaaataatggtgtatatactatttatttgaataatgaggaagtatattcagttgatataaataatagccagttacctacgacaagtgtaggtggttttgatccatttattaattttacgtacgcaaatggtaaggtagcatttaaacatgcaggtagaaagtattattatttgacgacagagaaatatagtgcagatacggtaagaagactgaaaggaactactaaggatattattattggtttgcttggatttgttcctgtagttggcccctatgtttctgccggcggttttgcctatactgtttataatgatatttttggaaagaatcctaaaaataaatggtatacgataaaagaatattgcactagagggtatgaatattatgcttggaagacctatacttatactgactctcatagaaaacatctacaatctgttaaatgggagtataaaaaagtattatgagaggaattttaactagtagagttgctagaggcatattagcgtttatatttatattttttacgggttggtctgctgcaagattaatagtacagatagaacgttctgaatcgatatatgactaccttattttgggaggatttagtctagttttaggtattttggaactctatagattaataaatagtaagtaacctgaaaattttagaaaattgaacgttaacgtgaatatcaatataacacgcttagcttaaatagtcttattacttaaacttcccacacgcaaaattgcttgtttcattgtgattctgcgtgttttgacaaatataaaaggcacaagtccttttcattgctataattatattgaccaaaacataatttatttgcatgaaaggcttgtgccaatgtctattttaccatctcctgaccaacaaaatgaacaactattttcaaactcaatcatcagcttcatcaagaagtttcaggtgatcaagctgttgagaaaatgtggcttccgcaaggaaaaaggcattagcctgttcagcttgtttctttacgttttaagcaatgtctttcgtgaccgcagcttatatatgcagctgaaaatggatcattttcaagaaaatttttccaagaactcatattaccgttttatgcgcaacgttcacgtcaattggctccacttcaccacacttctgtctgcgcaaatcattaataaccacttgcgatctttgacttcagaaaaacgggctgattgctttgttgtcgatgattcctacttctctaggaccggcttcaagaaaacagaattagtcgccaaagtttttgaccatgtatcaatgacttacaagaaaggttttcgcatgatgaccctgggctggactgatggagcttctttcatgccaatcaattcagtgctgctgtcttctcagaagctacagaatatgattggcgaaaataaagtttttgatcagcgcaccattgctggccaaagacgtatgcttgcccggactaaaggcacagacgtgatggttaatttaatcgaccaagctatgaaagcaggtcatcaagccaagtacgtgctgtttgacagctggttctcaaatccacatcaaatcgtccagctcaagcaaaggaagctggatgtgattgccatggttaaggttagctccaaaatcaaatatgaatttgagggagaacgcaaaaacatcaaacagatttatcgcagctgtaaaaagcgatgcggccgttctcgctacctgctgtcaatcccagtcaaagtcggacgccaggacaaagacggtgctaaaatagatgcacggattgtctgcgttagaaaccgtgccaatcgcaaggattggctggcaatcatttgtaccgacatgtcgcttagcgaagatgaaattatccgcaactacggcaagcgttgggatattgaggtttttttcaaaacttgcaaaagttatctaaaactaagtacggaatatcatggcctgtcttacgatgctttgaccgctcatgttgccatagtttttactcgctacatgcttatgtcagttgccaagcgggacgatgaagatgaacgcacgctaggcgagctgttctattgcatgattgatgagctggcggacattacttttagccattccttgcaattgattactgatgcaatgctggccagcgtaaagcaagtctttcatgccagtgaagcacaaatagctgaattcacggctgactttatcaatcgtttacccaaatacatgcaaaaattgttaaagaaaactagcaaaaataatatagaagcctaaagccaagcaagatcaagagattactggcttatttagtgtgggaagtttaagttattagtttttataattcagtaagataatcggcaaaatggtaatatttagttgtagtcgcttcaaaggataaaaagtattcaacttggattactcaagctttcttgcaatactactacctaaacagcaagtctatgcaaggtgtgattaagccactcaagcgaattgctaatagattaaataccagtctgaagaaggcaaacaacaaacgtgactttaacgctgcaatgaaagctgctaagaagttacgtggcagtcaaagagattttgttttacgttcattgaatcaacttaagaaggatggctccatgaatgtagaaggaaagaacttgttattgtttggcttataaaattaagatattaagtagtaaagctcagcagaattactgagctttatttttttgtgaacggtagtcggcaaacagtataataaacttataccaaaaacattgaagtggattatatttagaaaagaagatggaaaatggctaaaaagttacgcacgcttggtattagcgattttgtcggcagggatgctctcatttttaggaatattggatgaaacagccacgacagttacttttccaacgttaattaaagaattttcgattaccactgatcaagttcagtgggtaaacacactagtcttattggtaattgcgactatcgtaccgattagttcacagattagattaagaatttcgactaagaaaatttttattctaggagttcttttgtttactttggggctaatcatcgatattttatcaccgcgctttgatttattgttattaggacgggcaatgcaaggagtcggcacggggattggcttaccgttaatgtacaatattatcttggctgaagtacctaaagaaaaactaggctttatgatgggaatcggcactatgattactgcctgtgccgttgccttagggccagtttttggcggaatgattaccgatgcacttaattggcgctggatcttcattatttcgctatttttaatgaaaaacgcccggaaattccccgtattttaatgcggggatggatagggccaagctgacctaatggtcagctttttttattaaaaaatgaagacatatgttcgactttcctgtaaaatataaatatctaatctacagaaggaggtgaaacacatgaagagaatgagcagtttagcctaccattttggcttgaaagtacgcttttatcctagttctaaacaaaagaaaatcatcaagctaaattatgatgctcagcgttttgtctacaactcttatgtaggacgtaatcggaacaattatcgggctaagggctacttagctgttagacaatatcaagtaatgccttttgccttttctgttcttaataattatgagactaagctagcagaagaagtagtcgccaataatgagttattggctaagccaaagaacattcgcgatgcttatagctttttacgcgttaaagaaattgacagtctcgctattgccaatgcgattcaaaactatcagaaagcttggaacaactatcgcaagcttggtcatggaattccgacttttcacaaaaaacgtagtgattggtcatatcagaccaactgtcagtatcctaaacagacagaagcctttcttgataacgggacagctagatttattgatgctaagcacgttaaattgcctaagctaggcgttgtccgcattgccagctttagaaaattgattaaagagcgttttcttaatcatatcccaactagaattggcacagtcacgattaaaaagaccgctgacgaccagttttacttatcaatgcaactaggcagcgatattgcctttgttaaggaattgcctaagacgcagagtcaaattggcatcgacctcaatcttgataatttcttaacagcatctaacggagcaatggtggctaatccacgattttatcgcaaaaccaaaaagaagcttgcccatgcccaacgtgtcttgtctcgcaggcagcgcagagctaagaaagagggacgcaatttgcgcttagccaagaattatcaaaaacagcgtctagcagtcgctaaactgcacgataagattcgcagacagcgaaatgacttcttgcaagtactctcaactgcactaatcaaaaaccacgatttagtagttgccgaggaattaagaagcaagaacctgttaaagaatcatgccttgtctcaagctatttctgatgttggctggcgcagttttctgaacatgctggcatataaggcagacctatatggcaaagagttcaaaacaattgatcctaagtacaccacccaaagatgccatcaatgtggcagtattatgggacaaaacggttataagaaattaacgcttaaggatcgagaatggacttgtccaatctgtcaaacgcatcatatccgtgattggaatgcggcagtaaacatcttagaaaaaggcttaggcaactggcagaattctaaaataaaaaaagcagcctaagctaggctgcagtccgctagcaactcgcggactcaaaaggctttggtaattagacgacctctatcggcaatagtcaaaagattattgttggtaagtcaagtccgtatctaagcaagttggtgttctggttagcgcaagctaacgagccagccaccaagccccagaatttattctggggtagttgacttatcttgagtctatttacgggaagctattcaattcggcagattaatccgcttgaaaaagtgaagttcaagtatgtgcaatggctatctttggctattgggctggtctgtttaatgctgggctttacgcggattgctaaatattcatttttctcaatccgagtttggggcttcttaatcttaggaattattagtttattaatttggctcaaaatatcttggtccgataaagcagcattgattagtccgcaactgtttaaaaatttacgttttagcatgcagttaatagcttattgctttgccaaaattgcgacgctagctttgggttttatctttccaatctatgtccaagctgtcaatcatggttccgtttcattagccggttgggttacttttcccggtgcggtaattactgcgttaatggcggccttagcgggcaagctgcttgataaaaaaggcgcgcggttgccgattattataggaataattgctagtttgactagtttaattttgatgaatgttttggcaccattaagcaatcttgccattgtattgttatatgttctttattatggcggatacgggatgtgctttggcagtttaatgactagcggtttgattactttaggtaaagctagccacgcacaaggtaatgcgatttttaatacgttgcaacagttttcaggtgcactggggactgctctttagctgggactttgattgcgctagcgcagaataatcatgtaggtaatggtacagcagtcggttctaaatggacctttatgatattactaattttgataattattaagttattcttggctcttgtgtttgtaccgaagaagagataaaagaaagtcagcgaaagctgaattttttattttgtaaatatattaactttaaatatgtaatatttgattaatatactaaacaaaattataattattttgatcaatataattatataggagaaactgtcaaatcttttgtgtaaatagttctttctcgtaaattgattttttaattatttatttaatcaaagtaggattctaaggtgtcctgaacctgaccaaagcctttatgaattcgattgaaataacggtcattgtagctcattgcctgaatgccaataaaagcatcaagcgactgttcagttggaaactctgccttaggcttagctttgcgcttgatcacattgttaaatgattcaatcatgttagtcgaataaattgaagctctgatctgcttgggatagttataaaagaccagcagatctggttctatgtctttcaagcttctgataacatggctgtaaaccttgccccatttggtatagaagtcatgcaggacagctgtggcttcttctttgtttgtctgttgatgcacctgtttgaattcgttcatgatcttttcacgatcgtcgacgcgtactttagcgcagatattgcgcatgacatgaaccaaacagcgttgaaaatgagctttaggataagtcctggccaaggctgttttcatgccaacaacaccatcagaaagaaaaagctcaacttgctttaagcctcgggatttcatgttttgaagcatatctgtccagacttcaatgttctcgctaggtgcaatgcagtagtcaatgacctccttgtgcccattaggcttgatgccaatggcaatatagactgcttcacgctcaaatgtttctcggcgcaaaggaaggtatgtcgcatccaaatagacgcagaaaaacttgtcgcttagcttgcgtttgtggtaagcctcaacctttggaatcatctgcttggaaatatttgatacctgagctggactgtaatggctgccatacatcttttcaattagatcggctatttccctggtggtcacgcccttggagtaaagcttgataatcatgctttccaagatatccgagtgctgcttgtagtcaggcagcgtgtgctgatgaaattgaccgttgcgatcccgaggcacttgcacttcaattgggccaaattgcgtatcaactttgcggaaataagcaccatttctagagttgccagtattccagccatttctggcataggaatcatagcccagaaaggcagtcaattcagcttctaacaagttattaacagcctgttgtagctctttgcgcaataaatcatttattttgtctggattgaatagagcttgagcaaaatctttggtaaaatcattcatgaaggagttcttctttctgtatgtgtttttttgttcaaaccaatcatacgagaaaggaactcctttttctaatgtttaaagaaataaatttaaggaatcattcatccttacacaaactattttacagtctcatataggagcaaaatatgaatccagatttacttgcggcacttattcttgaaggtcaaaaaaatattaaaagtattgctatcattcctcgtgattatcattttgaagatagtttgaattatgtgttagtaggcttgcggcgggctggcaaatcaacgttattatttaaaagagcacaggatttagtagataaacaaaatgtggattggtcacaaattgtttacttgaattttgaagatgaacgactagatggttttcaattagctgattgtaataatatcttaattgcagccaatcaattaacaactaagaagcattattttttatttgatgaaattcaaaatattgctggctgggaaaaatttgctcgtcgtttagcagatcaaggtgaaagtgtttatttaaccggtagtaactctaaggtgttgggtcatgatattgttctgcggctgggtggaagatatatgaccaaatatgtggcaccttttagttttacagaatatttaactgctaaaaaaattccacatgataaattatccgtcttggatacagttaataatggccaaattcgtgctgccgcaaatgaatatctatgttatggtgggttgccagaatctattatcttaacagacaagagaaattacttaacaagtatttatcaaaatgtatttttagctgatatcattgttcgcaataagattcgtaatgaaaagacgatttcattattacttagaaaaattgccgatacagtaatgcacaaagtttcatatgcaactttgtataaaaatataaaaaatgtgattagtacggtaagtcgcaattcgattattgattatatcgattacgctaaggatgcatatttgttattttccaccaaaaattattttgctaaatttagtgagcgtgaaagcagcccaaagtattattttacagataatggcattttaaatttgttttatctggataaattgccagcattactagaaaatctagttgcgatcaagttgcataataaatatcaagagaatttattttatttaaaatctcaaaagacagggatagatattgatttttatacgcgtggtgctagttaaatcgttctagacaataagccaaattataagctaaaattgcaatttccaaccggctttgaaagcctatcagactacgtgctcgattgttctcggcattgtaataggtcagaagcgaaaagtcgctttcaattgttctgcgaatagccatcaattgatgatcattgtgctttttagctcctgtcatatttttacgatatggtgtccaaagttcgtaacccatttgttttagctgttgatgcagttctttgcctaaatagccttcgtcgccaagaagatagtaattagatggatgggtattttctatcagttcaactgtctccctggcatcatgaactgatgcctttgttacgacataatcaagaatgtaaccgtcatcgctaacaatggcatgaactttgaaaccatagaagtaaattttcttggtggccttataaccaatgttggcataaccgcgaaaaattttagcacgatagtttcgaattggttggcaaacaggtaccggaaagctgtcaatgatcaagaactgtccattcaggtcaacctttttattcatttcttgccgtatctgataaatcaattgcaatagctgacgtgaacgccgattaaaacgtgagtgtgataaacaattgaaacattcacagaatcttctttgtgattcaattcctgtcttagcttgccagataagtaaagccaaaatcagactgtccgtagttttaatttgatcaatatttcgccgatgagtaaactcagccggtgcatacaaacgataccagtgccgacaaattatcactaaatctttaaaactaacttgtaaatggtggctaaaacgcttaagcttaaggcagttcaatcagatcagactcttttctattattactatttacaagtcgagtctaacaagattggacttttttattaactaaaacgatttaactagcaccacgcgtatttttatgtaccagctagtaaaactgcaattcaagttgcatgggaagtaaatgatacgtcaaaagaacgtgaagttgggaacctaattaaattagctgataattttgatgaagttgaaaacttaataatcgttactcatggtgaagaggctgaaattcagcaaaaagataagataattcagttaatgccactatataaatttttattaatgagatagtttttcgataactcataaaatggtaatgctcaaaattttttgagcattttttataactataagatctaaagagatataaaaatggacataagatctaaagagatataaaattaaagccaacaactaaaataatgaaaataggtgaacatcaattatgtctgaaataacgaatccatttgaccctaactttggcaaagttcccaaaatatatttggggcgacaaaaaatagtagaagatatagtaagatcacttgaaagtggcaccggaccctatcaaacttcaatgatctatgggatgcgcggggttggtaaaacttcattacttgctgatattacctcaactttagaacaaaaagataactggattgttatttacttagccatgacaaatgatttgcttgccacgctcatccaaagtatttatcaagaagcagcgaatccagtaaaaaaggcgttgaacaaaattgatggtgtaaagttttcggcttttggctttgaattggaagttcatatatcaaatcctcaatctacttatcaagtgttacttgaagaaatgttaaaagttttaaaaaagcatcaccaatctttattgatagcaatagatgaggttaaagaaactcctgagattgttaatttggcgtctatctatcaaattatggtgttaaaaaagtattcaattaatatgatgatgactgggctgcctaagaatgtttctgaactccaaaataatgatgtattaacatttcttttaagaagcggtcgtgtaccattaggaccacttgatcttttcgatattaagtatcggtatcaaaaagcatttgaaagaggtaataaagagattaataatactgccttaatgaaaatgactaagctgactagaggttacgcttatgcatttcaagacttgggatatcatgtttggcaacattctactgatcaggtaacagatgaaagtattgaaaattcgatctcatcgtttaaaaatgatctgtttcgtaatgcttatatcaagattatctctgaattatcgccagtcgatcgaaaatttttattcatcatggctcataatgataaaaatgttgttaatataagtgatattcgcaagcaaatgggaaaaagttctaattatatttcgcaatatcggcagcgattaatggatagtcaggtaatcattgatgcaggatatggcaaagtggcattttctctgccattcatgaaagactttttgttagaagcagaagaattatatgaaattgataactaacgaagaaagttgctctcaaaaatagagcaactttttatttgataattagactcttcgcttttgtccaccaaatgtgtaaacaataagcagaggtaaatgataagatccaggttaacagccagattccaaagaaagttaagaatgggtggtaaatggcgtgatattgcatgttaagaccgcgccaaactaattgattccagaagacattggataaatatgcgcgataagcataagtagccaagaaatggaatacttttaaactggtttgcgaattttttctaacttgatgcaggcaaaaagctgaaatcagtgcaattactgctaaacaatagagagtcattgacggcttgtaatatggtgcattattgaagttgattggataaccgaacttgtgcaactcaacattagtccaaatgaagcaagcaataaataatatggtaattacccaccaaaacttagtgaccagctggttgtaataaccacgcaattgccatgctaagacgccatacacaccatagatgaagaatgaaataaaaatgcggtcgagtaaataccaatcatgttcatgcatgccgtgaaagacgttgtaatcatagaaccaaagccaggcaaaatagagtacgaaagtgattactgcaatccaaatgcctcgagttagattgtgtcctacatagcggcttaatccccagaagattggcatcaaaataataaactgcaacatcatcgtgttgtaccacaagtgcggggcggcattaccattaatgaattgccaatagaatgaaccaatattgttaaaatgattaacttgttgcaaccagggcatccctaatagataaatgagcgtccaccaaatagtaggtacaaaaagattagaccaatttgtctgcatatgttttgcataagaaaaactatttttttcattattagtacggattgtggtatacaaaataccaaaaataaaggctggagccgtatatttgactaaattataaaaaacgccaaaaacatcttgtgtgtgaaccggttgttctacgtccatgaccagcgacataattggctgtgagattactgcgctgcaggcgaatacttttaaataatcgccaatatcagctatttgatagcttttaaattgatctgttttcatgaacttgctctcttcttttcctaatattattgtgtcatttttttaaattaggcgaaaggataatcatgttaaaattagtttagctattttggaaatggggtcaaaatgtcagtagaaaagatcacacaaaacgcactaaaagcattgctttatgaagtagttaccaatcctaagccaggtttagtggatccagttgacgtggggtctcatcctgatatgaatgtgtatttgtttattaatagcagtttgagtttagaaaattattttcggcaagcagctaaaattggagcagattttacggggcaggatttgcggcaaatgtttgaacaattgcgtcaagctggcattgaggcagaaaaagcaatgtttaagacaacgcataatataaatacccataaaggcgcgattttttcgttagggttgtttggctgtgcaagtagctattgtgaaaataataatcaaggtgaatttgaagtgatccagcagatgactaagggcttagtaaagcacgatttaggcaagaggaatgagactgctggagaaaaacaatttttgcaatatggtaaaggtggagttagagcagaagcagaagctggttatcctttggtgagggatgtagcactgccatttttagctcaaaccgaaggtgatttgaatgttcgtttactcgatacgttgatgaaaatagttagtgcgattgaagactcgaatttaataaaaagagcgggaaatattgaggttgtttcttgggcacataatcaagcaaaaaaatatttggcattaggtggctacggtactcaagctggtaaacagtttatgttagaactaaatcagatttttaaagagaaaaattatagccttggtggcagtgcagatttattgattattacaatttttatggcgttgcagcgtgggattatttaacgcaaaaattgtctagttaagaactagacagtttttttgcttttagatttaaagagatttaaaatgaaaaatcctgttaatccgacttttggagatataccacaaattttttttaaaagataattcggataatgaaactaaaaatgtagattcaattttctatttaggtttagataccgagtattgaaaaagcattaagctattgcagatagcttaatgctttttttactatttgattagatttcttataatccaaatgcaattttgtataataatgcaccacagattccacctgcaattggtgcaaccactggtacccaactgtaatcccagtgggctgaacctttgtgtggcaaaggacataaagcataaacaattcttggacctagatctctagctggattcaaagctggtccagttggcccaccaactgccataactaaagcagtaattaagaaaccaaccccgatgttagcaatgtcttcagattgcttgaagaacatgccacgatataaaccaactgcgatgaaaagcaaaatagcagtgccaaagaattcggtaataaaaccgttgaacttactgttagccgaatcaccagtcgcaaaactggcaaaaacagcatcatcactagtggttctgccaatgtaaggccagtagacggctactaagattagttgtcccacgatggcaccaagcatttgtaccaagatgtaaggcattacttgatcccatgggaagacgcctgaacaagcctgagctaaggtaacagcagggtttaagtggttccctgaaattgaaccaaagagcatggctgggagcattactccaaacccaaaaccgaaggcgatcaagagccacccaccattggcttgaccgtcacggctattaccaccggtatcacgtagtacagaattggcaactgatccgttacctaaaacaactaaaataatcgtaccgaaaaattcggcaaaatacttcattaaccaagtatgttccataatagatactttcttctcctctagtagaaaaaataagtgaaaaatagtacaaccacaaattatactcttaactcgaaaaatagatatagttttttgtaaaaaagcaagaaaatagcattaaaaaacactaacttttaaatagttttaaattaattaaaaagatttactatttggctgcaatcatcacaattttctaattatccagcaactcaataaattagaccgttccaaatatgaacattatttaacaagccctagataatgccaaatctacttttgacaaataaatgcataatcattatattaatttcacaaatttggtatatagctttatatatacttaatatataactttaagcgctttcaaaatattgtggtactatacagttattcacaattaatatgcataaaaggaaagagagtagcagttaatgagaacaatatatttggtgcgacatgggcaaactttgttcaatgtgcatcataaaatacaaggtacttgtgattctcctctgacggaattagggagagcgcaggcgacagcggtgcggcagtattttttgcaaaaagaaattagttttgatgccgcattttgctcaaagcaggaaagggcaagcgatactttagaaattataactgataatcaattgtcttatacgcgactgcgtgacctgcatgaaaaatctcatggtgaatatgaaggacaagatgaattcatgttgccatggcgacgtggctttagccgtattaatgccgcaatggagtcggatcaacatgttgaagaaagaatggaacgagcgatcactaaaatcattgattcaacccatgccaacgatacaattttgattgttggacatgggacggcttaaaggttatttacgcagcgagtaaatccaacttttaaagaatatgataattgcgggatagtaaaaatgtctgctgttgataataacttgaaatatttaagttatgtagcacccgctaaagatgtggttttaaataaagcagctaaaaacgaaatgttagttgtgcgttaacgaaaagagaacaagcatgaatagagataattatattttgtggtttgatcaattgcattgcgatgatgttgatttagtcggtggtaagtcatcctcattaggtgagctgacttctgaaacgaatgtcccggttccgtatggttttgcgactactgccatagcttatcgccactttatgaattattctgatttaaatccaaaaattgataaattattggccactttaactgatccagaagattctgagcaattgcatcgaatttgcaccaaaattagaaaattaattatagaagcgccgatgccaaatgatttagccttagaaattagctgtgcttacgatagcttagcccaaaagatgcaccaaaatgagccattcgttgctgtacgttctagtgcaactgccgaagacctgcctgatgctagttttgctggcgaacaagatacttatttaaatattcatggtcgtgagaatgttttgaaaaaggtgcaagaatgttacgcttctcttttcaccgaccgggcaacttattaccgaattaaacaaaactttccacaagaaaaagttgctttatcagctgcgattcaaatgatggccttttctaaagcagctggtgtgatgtttacagtcaatgtagcaactggtgatgacactaaggttatgattgaggcctcttggggactaggcgaatacgtggtgtctggaactgttacacctgataactatgtagttgataaaaatacgatgaagattgtacacaaaatggtgactaaaaagccaattgagttgatcagattgccatcgggaggaacaattgaacaaaaggtagcaccagatcaagtgaatgagcctgctttgactgatgcacaaatcattgaattagctggttatgctaaagaaattgaaaaacattatggctgctacatggatatggagtggtcacttgatcaaaatgataagttgtggttagttcaagcacgcccagaaactgtttggtcacaaaagaaaaagcaggagaaaaccgatgcaccacaagaagcaactacagaacaccgagtattgttaaaaggcttgccagcttcacctggttttgtctcaggcaaggtacatattattgatgatccaaaagatatcaatgaatttaagcagggcgaggttttggtcactctaatgacgtcgcctgattgggtgccagcaatgaaaaaggcggccgcaattattaccaataatggtggaatgacctgtcatgctgcaattgtatcacgtgaaatgcagataccttgtttagttggaacaactagccgtggacaagctgctacgaaaactttgaaaaacggcgagactgtcaccgtcgatgctaaaaatggtgtggtttatgctggagttgttaaagacgcggttaaaaaagtcgatgaaaagccagctgagcctgctgcagttgaatatttcccaccaactgcaaccagagttatgatgaacttaggagatcctgatcttgctgaaaaatatgcatctttgccagctgatgggattggtttaatgcgcgaagaatttttatggacgacttatattcaccagcatcccctttatttgattgaaactggtcatccagagagggtagttaacgagctagctaatggaatcggtaaagtcgcgcgggcaatggcaccacggccagtagttttacgtttttcagactttaagtctggcgaatatcgcaacttaaagggcggcgacaaatatgagccgcatgaaccagcagacctattaggctggcgcggtgcttctagatattatgatccaaaatatattaatgcttttaaattggaacttgaagcggtaaaaaaggtgcgcgatgagttcggattaaagaatttacatgtgatgattccattttgccgaacagtggatgaagcgcgcaaagtgacggaaatcatgcggacacaaggtttagttagaagcgcagacttcaaggtttacatgatggctgaaattccagctaatattattttggcggaccagttcaatcaatttattgatggttattcaattggttcaaatgacctaacgatgcttttactggggtgcgatcggaataatgatgtgattgctgatctttttgatgaaagaaatcttgccgtcaaaagggcgattagacacttgataaaggttgctcatcaagatggtaagacggtttcgatttgtggtcaagcaccatcagaatatccagaatttactgaatttttagtcagaagtggcattgattttgtatcagttaaccctgacatggtgaaggcgactaagctaaatgtagctcattatgagcagaggatcctccttgatcatgcaactggcttaggtaaaaaggatccaaatgaatataattgggaaaatttataatttgatgaaaagtctttgattgcagtattgcagtcaaaggcttttttagagttcaattttgtttttgggcaattttacatttaatttagtaaaagagtaaggttgaactaatgaaatttcgtaagcatctaaggctaatctctcactggcaaaatcagggttatataaaggatcgcctacaataggacttcctaaagaggcaaggtgaacgcgaatctggtgtgtacgaccagtttcaagcgtcaatttgacaatcgcagtattgtcatcatttttttgtaaaacttgataatgagtaactgctcttaatccagtaggatcgattttgcgtttgcgttgatcaagtggatcgtgaccaattggggcattaatcgtacctctttcagctaagtgatcagcattgataactttagctaaataatcgcggtgaaaaattttgctggttaattcacgatttaaaataggtacaactgcaggatttttagcaattaaaagtaaaccaccagttaacatatctaatcgatgaacaatatagggactctgaccaagataagtagtacaatcgttcagagcagtattagtttcatttagattagggtgcgttttttgcccttttttcttattaataattaaaagattatcatcttcatagataacatcgggcatcttaccgcttggtgcataagcctgttgatcactttcaacatgatccaagttaatttcaattttatcaccaggtaaaatgttttgattaaaatagcgatagttgccgttaactaaaatattttgttcaattcgcaaaaaatgacgccacttgcgagggattaaaagttgacgtagtacttcattgacagatgccggagcaagattttctgggtaaaaaagtgtaaaatggaaactcataataatttcttaagtctaatctagttataaacacgtgttttgatagtatggtacaattttcttgtttctaaaaaggagcaatatttaatgaataacgaccaaccaagaagaggtggctttaaagatgcttggcatcgatttgatagtcgcttctttatcggacgctggattattttaatcctgctcacattgatgctcttaacttgtacctattatacaattaaagttaagacatcaaacatagctaatttgaaggcctcgctttcaaccacaactacaatctatgactacaagggcaaaaaagcaggttctttatactcgcaaaagggatcatttgtggaatatgaccagatttcgcctaatattcaaaatgccgtaatttcgactgaagatcggactttttggaagaacccaggttttagtattaaaggcatggtgcgagctgctttaagtttagtgattcatcacggtcaagtaactggtggtggttcgaccttaactcagcagttagccaagaactcgcttttgacccagcagcagactttttcaagaaaattggaagaactcttttttgcaattgaaattaaccatgtttactccaaaaaagatattttaacgatgtacttgaataatgcttactttggtaacggagtttggggcgtgcaagatgcaagtcgtcgctattttggcaaaaacgcaagtgaacttaatccgagtgaagccgcaactttagctggaattttacgaaatcctagtttttataatccggttgatcacatgtcaaatgctttagcaagacgaaatttaatcttaaacttgatggtggataataataagttgacagcggctcaagctaaaatgtatcaaaagcaaggattaactttgcggaatacttttcaaaataaaaacggctatcgctatccttacttctttgatgctgtagttgacgaggcaatctctaaatatggcttaactgaagaacaagtcatgaataaggggcttaaaatttatactactttaaatcaaaattatcagggtaaattgcaggatacttttgagcaaagctggcttttcccacaaaatggtagtgatggaactgaaagccaaggcgctagcgtggcaatggacccaagtactggtgctgttcgggcaatcatcggtggtcgcggtaagcacgtcttccggggttacaatcgtgcaacgcagatgaagcggcagccagggtcatcaatcaagccgttggcagtatatgccccagctttacaaaatggctatcactatgactcgcaactatcgaacaagttgcagaaatttggtaaaaatggctatgaaccgcataatgtggataatggctattctaatacaattccaatgtatgaagctttagaacaaagtaaaaatgtgccagctgtttggctattggataagattggtgtaagtaaaggcgtgcaatctgttgaaaactttgaaattaaggtaccaaagagtgaccgtaatttagcgcttgccttaggtggattatcttcaggtgtttcgccaattcagatggcacgtgcatattcagcttttgccaacaagggtaatttgcctaataattctttctttattaccaaaattactgatgcttcgggtaacgttttagccgaaaataataatccaagcagccaccgcgttatttctgaaaatactgctaaagaaatgacgactatgatgctcggcgttttcactaatggtacaggacgctctgctcagccaaatggcttccgtgtagctgggaagactgggtcaactgaagtacctaactcatatggatttggtaccaaggaccagtggatcgtcggttatacgcctgacattgtacttgctacctgggttggttttgaccgcactaacaagcaacactacatgcagggcatttctgaaacaggaattacgcgtttatataaggctgagatggaaggaattttgccgtacaccgcgcaaactgaattcacggagaaggcacctaaccagattgtgaagaataatggttctaatgatgactggactaatggattaggtgaaaaaattcaagatggactcggttctgcaggacagaaaatcaatgaatggtataatagctttaaaggcttatttggccaataaaatttaggaggactagatggttaacatttacgatgctgctaacaagttagcagaagatttgactcaaactgatcaatacaagaagttgcaagaagcaattaaagctgttgaagatgataaggatgcttcagctttattcaaaaagatggatgaattgcaaaataagatcatgcaagcacaacaagctggtcaaccactttcagctgaagatcaacaagcttacaaggacttaaatgatcaagttcaaaagaatgataaaattgtttcacttcttacgaatgaacagggtttgtacgatttgcttggtgaagtacaaaaagcttacactaagccaattaatgatctttatgaagatcttagaaattaatattcgcgatgaaatttattcactttgcggatgcgcacttagatagtccatttcgtgggctatcttttttgccatctgaggaatttaaccatatctatcaggcagctgatcagtcgctaaaaagaattatcgacctagcattagctgaaaaagttgatttagttttaatagcaggggatacctttgatagcagtcagccgtcaccacgggctcagttgttttttgctgcgcaagtgaagagattaactgatgcacaaattcaggtagtgatgatttttggtaatcatgaccacatgaagcaagaagatctgctagttagtcccagtccttactttaaattgttaggcaatagtgaaacagtagagcaagctacttttactacggatgcgggttttaactatgacgtaatcggcttttcatatctgaataaccatatcactgaggataaaatcccagaatttccagcaaaaggaaaaaattatacttttggtttaatgcatgctcaagagaaatcagctactgctagtcagaatgtgtatgcaccgtttacagttgatgagttgcaaaacttgaattatgactattttgctttgggtcatattcatgcgagaaataatttaagtagtacgccgtggattgtttatccaggtaacattcaaggtcgccacattaatgagatgggagccaagggatgctatctaggtgagattgatggaaatagtggtaagactactattgattttaaagaaacagggccaattttatggcaagggacaaaaattaatcttgaaggagctatcagtaaagctgacttacaagcaaaaattattgccaagcttgaatctggacaaaaaacgtactttagtttgacgattgctggtgctcaatatttgagtgccgaagaacgcgatttagttcaggatcctgatttttggcaaactatttctcaatcgctgccatttgcttctcagttagttgatgtgcgctttgttgtgaatactagtttaaagttaaatgacaatgaccaacaagccttccaagctgccaaagaagagttatttgcaccagctgaattcaagcaaattgttagtgactggcaaaaaaaggatccagaagctgctaaattagcggctgatccagactttattgcggcggttaagaatctaacagaagtaaaactaatgagtaaattgaaaggaattaaggatgagactgaaacaaattaagattattaactttgggcagttctcgaataaaaccttcgatttgcctagtgatcaaattaatgttttctttggtgccaatgaagctggtaaaagtacaacggtagcttttattaaacagatcttatttggctttcatttgagaagtaactcttcaccgttttttgaagattatacgccgctagctcatgttagtccgatgggcggtaatttagtttttactgcagctgatggtgaatacgaacttgagcgactctatgctaaaggtgacaagactaaaaagggaattttaaccgtcaaaaaagatggtcaagttgtacctgagagtgtattttttgatcagattcaaaatattgatggctctttttacgctgatagttttatttttaaccaagaaatgctgggtcaggttaacagtttaagtcaagaggatttgcttgagcgaatttattacttgggagcagcagattctagcaagttgctggaaatgcgcgacgattttgccaaagaaacgggtaagctttttaaaaagacaggtaaaaagcccgaagtaaaccgtctgcttaaggaaatgactgatcaacgtgataaattagcgcagactaaaaatgagtttaatgattatgaacagctgcaccaagattttgtacaaaaaagagcggcattaaacagacaaaaacaagatctggctgttttacaaaaacaagaacaagatttgcatgatttgcaaaaagaaatgggcaattatcagacgctgcttgatttgcaaaaacaggtcaaggatgtcgactttaatggtcaaaattatcaaaaagcccaagatattatggctcagggacgtaatttgcaaaagacgattcaatcggtagaagcgcagttgcagggcctgggtgaaaacgatcagtctgattttacgctagagaagaagctaatccagcagaagcctcaactcttgcagtggcaagcggaatatcgtaattgtttgcaaaaggctgaccaattgaagcaggagaaagagcaactattagctttgacacctgagttaaaaaatctactcaagttgacaccagagcaaattgaacaaatgcaggcagactatcaagctttgccaggtgctgtcaatgagcctgcttatgtaactactaatgacaagctttggtatgttatcggtgcagtgttagcggcattaggtgtagttcttttggtagcgttgggtacagttggtgtaattgcattaattactggactaattttcctagcagcaggatacttaaaaaatagtaaccaaaataagcaaaatgcggcagtattagaaaagcaaaagctggttgctcaaaaacgccaagctttccaaacaaaatatggattgaatcctgatacgctaaacttaaatagcttactaactaatctgaaccaatatcaaatcaaaaagaatgccgcacagactaataataagcaagtaactgttttgaatcagaatgtggctcaactggcctcaagtgtccaaaatgcattgaagcaaccgattgataatgactttagtcaagttttgaacggtttggacgaacttgagacacaaattagtgaaaaacaagaattgcttcaaagaaaatccagcttaactgcatcactaaagcaggacaagcaagatttgaaagaattgggtctgaaattacaggcactttttgcccaagctaatgtggaaaatatggcaggttacgatcagctttatcaagattcacttaatcaggctaaactgaagacgcagattgcggccttgaaggaatcgttaggcgatgatcttcaacagctgcaaatgcagacaaattcaaccgaattagcagataaattaacggctttgactgaacaaattagtactaagaatgcagaaattaatgaacttcagagtcaagttgctcagttgcaagtgcagttagacaatttagctgattctactgcggtgtttaaggctaagcaggatctggctaatacagaaaccaattttgtccagagcagtaaagaatacttggctaacttgtttgcggcaaggtggatcagtcgctcgcttgacttggcatctaatgaacggttccccaagatgcttaaggcggctcaggaatacttagctttgctaacgggcggcagatatgttgggattaatttagataagaagctaacagtagtcagaagtgatggtaaaaagcgcgaagtaaaatacttgtcacgggggactgctgagcaattatactttgccttgaagttagcttttattgagcagatcaaggatgaaattaatttgccaatcttgattgatgattcgtttgtaaactttgatgatcagcgagtcagctatatcgatcagttattgcaaaagattagcgaaaacaatcaagttttaattttcacagctcaaaagaatttagttgatcagcttgggattgagccattaacttttacgaaaggaacacaggatgcttaagagattgttagattacaacgatggagaagaaatggacattgttgttttgattagaaactcacagttgcgtcataataaaaagaataagttgtttttagcgatgcaattcagtgatggctcaggcgagattcgcggtaattactgggatgctaacaatcaagatgcagcaactttttcaactgggacaatcgttgagttgaatggcaaaagagaagaatatcagggtcgcccccagattaggatctattctctgcgcgtggtcggtccacaagaaggctatgaattagatcaatttattaaatcagcgccggaaccagttaatgagatggaagctgaaattaataaatttgtgatgcagattgataatccgacctggacaaaaattgtgaagtatttacttcaaaaatggcatgatcgtttttatgatcatcctgctggtaaaagcaaccaccatgcggtccgcggaggtttagcttttcatactttatcgatgcttaaggatgccaaaggtttggctgataattatgagcaagtgaatagatcgctactttatgcgggatgtattttgcatgatatgggaaaagtactggaactttcaggttctgccgcaactcaatacacgactgaaggcaatttggttgggcatctggttttaattgatgaacaaattatgctggccgctcaggatatgaagatgaatctggagtcggaagatttactcttattgcggcatatggtgcttagtcaccatggccgctttgaatatggttcacccaaattgccggcattgctagaagcggaattattgcaccgaattgatgatttagatgctgcaatttatgcagtaacgaatgccctgcagcatacgcctaaaggcgagttcaccgagccactactgagtcaagatggcaagcgatattatcgaccgatgcacgattcagcgctagataacgcaaaacatttagaataagaaataagcatcactgcagttgatttgcagggatgcttattttgttgaaaaattgaactagagttttattataatttcatagtataataaatctaatttataggggagtaaaaaggatggatattgctgaaattactaaaatgattgaggcggttaaacaaataatagaaaagaatgattacattgatttgccgctatttcagaattctagtcaattaaggttaaaaggaaataattataattttatacttgatttgaatagaaaaggacatagacgtcctaaatgtacttttctattaagggaaaagagaaataaggaacagccattagttagagtagatattattggacgtcctcatcaaaatcctgttggagactttaaatggtcaaataaagtcattccttgtcctcatttgcatagagcggattttccaaaatatggtacatatgtagctgtaccacttttggaaaagaatgaaaattttcaattgagtcagaatgatttaaataacttgtgtgaatgcttgaagaagacattaaagtttttgaatgttgataatataaattcatataattttcgagaacaggaaagtttattttaaagaaaggggggagaacagttaaatatgtttgatgtagagaaaatgaagaaaatatattttgactggatagataaaaagattcaatttgtcccttctaaaaatcaggattatatgactatcactacaccttttttagatatgtacaatgattatatagaattagtgattgcacaaggaaatacatcaaaatatataattagtacgcgtggtgctagttaaatcgttctagacaataagccaaattataagctaaaattgcaatttccaaccggctttgaaagcctatcagactacgtgctcgattgttctcggcattgtaataggtcagaagcgaaaagtcgctttcaattgttctgcgaatagccatcaattgatgatcattgtgctttttagctcctgtcatatttttacgatatggtgtccaaagttcgtaacccatttgttttagctgttgatgcagttctttgcctaaatagccttcgtcgccaagaagatagtaattagatggatgggtattttctatcagttcaactgtctcccaggcatcatgaactgatgcttttgttacgacataatcaagaatgtaaccgtcatcgctaacaatgacatgaactttgaaaccatagaagtaaattttcttggtggccttataaccaatgttggcataaccgcgaaaaattttagcacgatagttgcgaattggttggcaaacaggtaccggaaagctgtcaatgatcaagaactgtccattcaggtcaacctttttattcatttcttgccgtatctgataaatcaattgcaatagctgacgtgaacgtcgattaaaacgtgagtgtgataaacaattgaaacattcacagaatcttctttgtgattcaattcctgtcttagcttgccagataagtaaagccaaaatcagactgtccgtagttttaatttgatcaatatttcgccgatgagtaaactcagccggtgcatacaaacgataccagtgccgacaaattatcactaaatctttaaaactaacttgtaaatggtggctaaaacgcttaagcttaaggcagttcaatcagatcagactcttttctattattactatttacaagtcgagtctaacaagattggacttttttattaactaaaacgatttaactagcaccacgcgtataattagtgatgatgggtatactattaatgagttagggttattagatattaatttaaacagaaaatctaaacgtagggactactttcaatcgattttgattaattttggtgtgaaaaatcagaataatgaattagtaattgaatttgatgacttagcccaatttccagatgcacaaaataggttaactcaatgtatgttgcaagcttttgatttattacagacttctaaaaatagtgttattaagtattttaaagaagatgtaacaaattattttattgataataatattccagtaggagaagatttgagtttactaggaaaaagcggacggaattctaagtttgatattgtggttggacgtacaagaaaaaaaccgcaacaagctattaaggtggtgaatacgcctattaattctaatatagctaaccctttatttagaattattgatgtacgagaaagccaacctaaaacagaattttcagttattgcgaacaatattaatagtcctgtttctagtgattttaagtctgcctttaagaactataatattcctgtttattcttggtcagaaagagagcaatggctttccaaatttaaattggcaatgtgatagttgattaaaggtgttgagctgaaattgtaaataatattagttctagcattaggcaatatggaacatttagaataagaaataagcatcactgcggttgatttgcagggatgcttattttgttttggtgaaaaattgtgtcaataattttttgaacaaagttattgacaaattagctgaagaataataacatgtttatacaattgaaaagcagagatgtttttggatagattagagacttgtctcctttctatttttttattgataaaaagttcaagaggtatacattgatttcctcttggacttttttgatgcattgaattgctaaagatgttataaaaattagggtagggaataaaaatgaaagcatcaaaaaaattaattttagtatcggcagctacgataatgttgactgtacctgttttagcaaataatcatttgtctaatccagttgttgccgcaagtcaagataatacacaaactactaaattaacgttctatattaaccacaatgcctatgtttacaatcatcaaggtaagcgtaccaagagcaagattaagaagggaaagttactaaaggtgactatattgaagcctaaggcaattactaacccaaatcaaagcaggtatttcttcaataatgtattagctggcaagtatttttcgttaccgacagtaagcatcaagaagacagactttgttaatattggcaaaaataaatatattaagccaggcaacattggtagaatctcgccaggaaaatatcaatatgcggatctgtcaactaaggaaattaaggtaattaccaaaaagactgctccagtaactaatcaaatagggatgccaattgctgctccaattaagaagggaactaagcttacagttgatcagaactattatcataatgttgacggcgctgatgattatttgagtagtctggaatattatcggattaaaggtactgataagtgggtcaacctacctgatatcaaaaagtcaactcggattatgccaaataattttgcattagctgcatctactgaagataattatgtcattgccggtaactcaacgtatctctataatattgacggtgaaatcgttgataagagttatttattgattacagatgttaatgttggcgttgatcgagctctttatatttggaacaagcaaactaaacaagctgatctatattatcatcttacggctaacaaaaaattggtctgggttccagctcttgatggaacaggcaagactggtactacgattaccagcaacggctcatatgctcaccaaactaaagatacagcaaatacttttgttaaagctagtgatgtgacaagtcaaaatccagttgcattaaaagttgataatacaccgagcgaagcacaagcagatgcaactcaggccactgctagtgactatggtgagttgcaagccttagttgatcgagcaggtcaaattaaaaaatcgactttatatcgtttgactgaaaaagcacagcaagaaagatatgatttggccgttgataacgcacaaaagttattgactaacaagaatacttctattgcggcagttaagcaggctagttggcaaattaaatacgatcaaagtaaattagacggacaaaaagtttgggttaaaaacatgaataaactaactaaggcagaaaagtcttgggtagtttcattggctaattgtgatatccatggtgatttacaaaaagaatatgctggcttttataaaggtaaaattgcggtagtgacttataataaaaagactttcaagagtgaacttgtacgctacttgaagttgtctgattatgctactgataaataaaattaaagagctcaagaatgctttaatgatgaagcatcttgagccttttgatttttagtaaaaaaatatccaagactgaaatcttggatactcattggagctggaactgtgcttgatgaggcaactgctagaatggcgattgtttcaggagctagattcgttgttagcccatcttttaacgaaaatactgctaaggaatgcaatctgtatgcggttccttacatgcccggttgctttagtccaacggaaattcaatctgctttaacttatggtgctgacgtagtcaaaatcttcccaggttcaattgctggtaaaggcattatttctgaaattcatggacctttcccatatgttaatgtaatgccaagtggtggtgtatcattaggaaatatgcatgaatggtttgctagtggtgcctatgttgttggcgtaggtggcggattagttggacctgctaaaaatgatgattataaagctgtattgcataatgctcaagcttttcataatgaatttcaaagtattatttatgccaactcagctgttactaggaaggtgccagtgaaggcatagttttttttgggggaatatgacgcccccctatttaaaaaataaattaatgaaataaaaaaacgtcgaatccattcagattcggcgtttttgattaactaaatatatttgttacttagtagttgaaacgtatgatgataatacatccttcaagtcgctatccttgattgaaacgtcagccttcttcaaaacagtagcaataacgtctttcatagtagcttggtcttgagccattgatgcgtaaatttgatcatcaatagccttcttgtggtcagcaaacttacccttagctgggtggctgatcatcttaattacgtggtatccagattgtgacttaactggagttgaagtaacttcaccagtcttaagcttgaaggcagcggtcttgaatgagctgtctaaagtagtgtcagttgagtcgaatgatggcaacttaccagccttgttcttagtagcagtatcaagtgagtacttcttagctaaaaccttgaagctcttgccatctttcaattgcttgatgatgctttgagcagttgacttcttagcaaccaagatgtgttgaacagttaccttaggttggtagctcttccaagcttgttgttcttgcttcttagtaactttcttaatgtgcttcaatgcttgttcagaaagaaggttagtcttaatgttttgcttgaagcttgaagcagtcataccgttttgttgtaaaacagcactaaattgtgagccgtattgcttcttgtagttgttgtattgcttgtcgactttcttttgagatacgtacttgccgtattgttgttccaaagcgcgattgatgatcatgttagccaaagttgacttaccggcttgtgacttcttcatttcatcatagtattgttcttgagtaatcttgccacccttgtatgaagcaacagtagctttagtgccgctattagaacaagcagcagttgataatgcaacgccagctacagctacgactgcagcaatttttttcatataactcttcataaaaataatatctccacatccttaaataagtaactgttcattaatataccataaaaaagggcgtttcgttttcaaattacgaattttcacagaaaaatcaaattttctttattttttcttagttctttgtgtcttgtgagttagtatctggcacgatgttttccaaatcttggttcaatttatcgctctttttttctatgcggttaacgataggttgaatatggtcggaataatgttcaacactatcattaatatcactaattgtacgttcagctgttggcatttgttcatttaattcttgactagcctttttagctttttgcaaggcagaattaaagcgttggctttcatgtttaattgcttcgaactcatcttttaatggcttgcctgggcgattaccattgctatctttcatacaggaaaaaactagcccagctgttgcaccaaaaactgtgcctaataagaaatgtttcatttttaacctctaaaattgtgccttaattttgttagcaacttcgttgtatttagcttcatcgtatttgtcagcgttgttgcgggtcatcagcttcaagccatcgccttcaaaacgaggaatgaagtgaatgtgtgagtgcataactacttgatttgcggccttaccattattagtagtaatgttcattgcagtaacattagggaaggctgccttaattgcattagcaatttcaggaatatattgtaaatagcgttgtgcgtcttccttggtgtagtcaaacaagttaacgatgtgcttttttggcaccattaaggtgtggcctgggttaacttgagaaatatctaagaaggccttaacatcgtcattttcaaaaacggtatagctaggaatttcaccgcggataattttgcagaataaacaatctttgtctaaattttccataataaaacctcatatccttgtactttagtttactattaaatccatgctatcataataaaggtataaattcagtaaagaaagataggaaaaatgacattaaaaattgaacatttaacgggaggctacacgggtgtcccggttattaaagatattaatttggaaattaagccgggtgaggcactaggcttgattgggctaaacggcgcggggaagtcaactacgattaaacatattttgggtttacttcgcccgcaaaagggtaagatcagcttgaacgatgttgtattgacgcggcaaccaactaagtttaagcgtgaagtagcttatattccagaaacaccgattttgtatccggaattgactttaaaggaacatttggagctaaccatgttgagttaccacttggatgaaaataaagcatggaaacgcgcacatgagctgcttaagatgttcagacttgatgacaagctagaatggctgccgattcacttctctaaggggatgcgccagaaagtaatgattgtctctgcctttttagcagatactagtttgcttgtaattgatgaaccatttactggccttgatcctttggcagttgctaacttaatcgatttaataaaaaaagcaattgctgacaaaaagatggtcttaatgactactcacgttttagctgatgcacagcaagcgatttcgaattatgctgtgttaaaccgcggcacgatcgaagttgtggggagtttgcaagaaattcgtcagcactatggccttaagccagatgatccttttgacaagttataccttgctttgaatagagaggataatggcaatgcgtgagttagcgaatagaaggttgagcgagaatcttaaacaatcagtaaaatatttgacgctggtgtttaatgacttctttattttagcgttgatctttttgtttggggcgctgatgttctggtatgcccaagctatgcgcgtaattcccaataatctgtggttctataagccacttgtcggctttatcatgtggttgccattattagctggtcgattagttaccttattaaaagaggccgacatgcaatttctgtttacgcaagatgaacaaatgggtgaatatctgaagccgatgattcgttacagtatggtgctgccaacaattctgattgttttgcttggcggaattctgtttccgtttgcgacggtaaaggctggaatcccagtttggtcatatgtaatcctgattatcagcactgttttattaaaattgtgtatgttgctgattgaaaaagagagtttgtacttctactacaattatccgcaatggatattattagtggtaactctggcggctttgttgattggctcactaggatcatttatttatccaattgaagttgtagtattaatggtaattacgcattttggtactaaaaaagaaaagggcgtctttaactggcgctatgcgattaaaactgaacaagctagaaaagatcgcgtttattcaatcttcagtatgtttaccgatgtggcagaaaagcaagttacaatcaaacgcagaagatacctcgactttcttttaccaaaatcattggctaaggaaaatcctaatttgttcttgtatcggagatcacttttgcgtaatccagaatacttgaacttattagtcagaatgactgtctttgcaatcttggtatcgtggttagtgcaagattggcgttgggcactaggcctttcatgcttggtaatctttttaacggtctatcaattattgccaatggcaacagaatttgaccgcaacttcatgtaccgcgtttacccaattgaacggcaaaatcgtggcagggacttggtaaaggtgttgacaatgggcttgtttattcaatggctcttgattagtgtctgctggttaattgtgctaccaattaatgttaacttgtttgaagcgatggcaattttacttggtttcactatgattgtaactgccacttacttgccaggcagagttaaaaaaatgaatcaaaaaaattttggaattagataggaatagagaatgagattaagaaataaaccttgggctgttaagcttgtaaacgaccatccagaaagtgttttgcaaaatcctgatcctgaaaaaaagatcgactggactgaacgatttggtaatgatcatcccatcgaaattgaagtaggttctggtaagggacatttcattactacgttagctgaacaaaatcctgataaaaattatgtcgcattagaattgcaaactacggctgcggggattatcttgcgaacaaagttggaaaagggcttggataatttacaaatcttacgcggggatgcggctgacatcaactgcttctttccagcaaatagcaccaatgttatctacttgaattttagcgatccatggccaaagactcgtcatgaaaagcgtcgtttgacttacaagagttttttgagcaagtatgaacaagttctgaagccagaaggacatattgaatttaaaaccgacaatgcgggcttgtatgcttactctgttcagagcttgaataattatggaatgaagtttgattttgtttcagttgatcttcatcatgaaaagccagagattgtggaaaagaatattgaaacagaatacgagcataaatttgcagctaagggtaatccaatttatgctttgcacgctcattttgaggatgaatagtttgaagcgtctagagttacagcagataaactctaggcgttttttaatgctttattggataaaatcttgctactagctcatcgctttagttattttgttttagaatagaactgtaagatttcagattattggagggaaaattatggaagatacgcgtggtgctagttaaatcgttctagacaataagccaaattataagctaaaattgcaatttccaaccggctttgaaagcctatcagactacgtgctcgattgttctcggcattgtaataggtcagaagcgaaaagtcgctttcaattgttctgcgaatagccatcaattgatgatcattgtgctttttagctcctgtcatatttttacgatatggtgtccaaagttcgtaacccatttgttttagctgttgatgcagttctttgcctaaatagccttcgtcgccaagaagatagtaattagatggatgggtattttctatcagttcaactgtctccctggcatcatgaactgatgcttttgttacgacataatcaagaatgtaaccgtcatcgctaacaatgacatgaactttgaaaccatagaagtaaattttcttggtggccttataaccaatgttggcataaccgcgaaaaattttagcacgatagttgcgaattggttggcaaacaggtaccggaaagctgtcaatgatcaagaactgtccattcaggtcaacctttttattcatttcttgccgtatctgataaatcaattgcaatagctgacgtgaacgtcgattaaaacgtgagtgtgataaacaattgaaacattcacagaatcttctttgtgattcaattcctgtcttagcttgccagataagtaaagccaaaatcagactgtccgtagttttaatttgatcaatatttcgccgatgagtaaactcagccggtgcatacaaacgataccagtgccgacaaattatcactaaatctttaaaactaacttgtaaatggtggctaaaacgcttaagcttaaggcagttcaatcagatcagactcttttctattattactatttacaagtcgagtctaacaagattggacttttttattaactaaaacgatttaactagcaccacgcgtatggaagataaaccttattatgaacaagaatatcacgaacctaaaactgatattcctagaccaacttttggacaagcattcaaacttttgtttactgcaccatttaagtagaatgcacgtagtactcgtcgtggattttggtatgcctatgtttgggcaattattttgctagtcattttagcagcatgttcagctacggcatattcaattgatggcattgcttattaaagtaatgaattcttcttattaacgcacgtttcaactggtacacttattattcaaataattatctatctactgattatttggatcttattgggcttacttggctttaccataagaagattgcatgatactgaccacaccggttggtggtactggatctcggttattccatttggttatttgtttttactttacttcatggttttgccaactgttgaaaaaccagttcgttggggcagttatctatttaaagaaaagaaataattgtaagactcaatttctagctttttagttaaagaatggttataataatatcaacttataaaaagtaagaaatgcatgaggtgtgaaaaatggaaaagattaaagaattaactgaagatcaattaaaggaaattactaaagaaggacgtactgtgcttgaattctcagctgattggtgcccagactgcaagtttcttgctccatttatgcctgaaattgaaaaagatttttctgatgcaaaattctacgaaattgaccgcgacggttcaattgacatagcaaaaaaattaatgattatgggaattccttcatttgttgtctaccaagatggcaaagaaattggtagactagtaaataaggaccgtaaaactaaagatgaagtggaaaactttttacgatcacttgactaatagaggagaataaaaaagcatgattactagtactaataaagaagcttatcctaacactttgatcgttatcttaggtcacgatgaaggccgtagctcatttgaggaaaaagaagacgttactcgcgtaactaacgatgaaggcaagaccattggttacaacttcttcaacgttgataagttagttgactttgataagttaccaaatggtccagttaagttgtcagacgatgagcttgttgcactgaacaagaagcttgatgaagttggttttactgacaagttagcatatggcaagccaactttagtttatggctacgttaagacttgtgaaccacaccctgattcagatcacttgcacgtaactactgttgaggttgctgatggtgaagaaccccaaatcgtttgtggtgcaccaaatatcgctcaaggtcaaaaagtagttgttgcacttccaggtactttaatgccaaatggtgcacaaatttggccaggtgaattgcgcggtgttgattcatacggcatgatttgttcagctcgtgaattaggtttgccacacgcaccacaaaagcgcgggatcatggttgttcctgatagcttcgaagttggtgcagaatttgaaccaactaagtgtgatgaattgattgctagtggtgaaattactttataattttaaataaattagaaaaactccttagttacgaaaactagggagttttttggttagctctgccacaatttaccatctggagcaaggttgaatgagccaagtttttttgatattaatttattgctaagatctttgctacaagtatagtaaacgtatttaatgaaatcgccattgtcgttatagcgttcttcataatcactcaaatatagctgatgatttttcatgaacagtggaatctgatcttcagtataggtgattgcaaatttgtctggaaaataccctttaactgtgcagcctttggtatctgtcccttgatcgttatcactgactaattgcacactgtcgtcgctggaaattaaacgtaaattatgcaaattaacagcatttaacgaacaagtgaaaataacttttgcttctttttctggttgatatttaaaaatatgcaattcatttgatttagtatttacttgagtaaaatagaaaaagccatcattaaaaattggttcgccgtagcacacgttaggttggactgaaaatggtgaaaaagccttactggtcttttgatcaaagaagattaagcgattaccaggataaatgcgagtttgccaataatcgtcacgcagatcttcaaattgtacataatcagaaatcgttacccaatattgatcttgaccggctaatggtctttgatcacaccaataaggcaagatgaaactatcattaactttttgccatttatcattagagagcaaaatgatatttccttgcatgtcgcttagaatattatcatcgaagtccttgatgataattcgatcagggacatgttcatagtcattatctgaataaaaatcgctatcttgttcaaaatagagtttagtgtcattaatgaagagcaaagtttgatctggttcgttaactactgaagatttttgtgggtaataaaagtcgatgttatcatcaaaagaagcaatccagacgtgtgccttatcgtaaaccaatgataaattataagtgtgtaaaccagtaagtggcatttgatggatgatttcaggttcttgtccaggtaaatacttaaataaggttagttgatcttgtttaagtaatgcatgtagaaaatagaaataaccatattgatagatcacgctaaagaaaaattgattttctttacttgaaattggttcaaatttttgtccagtttgaaagtcaaagaagactaactgattgcctggaaagggatgcttttgccagtatttttcagtagttaaatcgtaaatatcgattgcactatcctgacaatcgacaccgtagcgtgattgtccttgaatgattgttaaatcattgccggttacaggagaaaatttatcgaatttcattgatgcgtacctttctgtaatttttcaaaattatatcacagaaacaatggtaaaatagttaacgaataaaaacgttgaaatttcgagggacaaataatgttagataaaaataaacaaatttggttcattggtatcaaaggtacagggatggcatcccttgccttgcttttacatgacttaggttatgacgtagcaggtagcgatattgaaaaatacacctttactcaagtgccacttgaaaaggtagggattgatgtcaaaaactttaacccagataacatcaagagtaacgaagaacaagtaattgttaagggaaatgcctttaaagaagataacccagaagttaaagcttgtttggacaaagatgtcaaatggcaatcttacccagatactgttgaagaaattgtccaaatgcatacttcaattggtatttcaggaactcatggcaagacttcaactactagtctcttatcacatgtattaggtgaagttgccccaacttcttacttaatcggcgatggtcgcggcaaaggtgtggcagattcgcgtttctttgtttatgaagccgatgaatatcgtcgtcactttttggcatatcatccagattaccaaatcatgactaatattgactttgatcatccagattactttaaagaccaagctgattacaccagtgcttttcaatcagcagctgatcaaactaagaaggcgctctttgtttggggcgatgacaaacgtttgcaaagtttgaagactgacattcctaagtacacttatggcttcaaggataccgatgacttccaagcagttgacattaagaagtccactactggttctaagttccatgttttagcacatggtaaagatttaggtgaatttgaaattcacttatttggtgatcacagcatcttgaactcaactgctgttattgcggttgcttacactgaaaaagtgccgatggatgacattcgtgaagggatgttgacctttaagggtgctaagcggagatttagtgaaaaagactttggcgatattgcagtaatcgatgattatgctcaccacccaaccgaaatgcgtgcaactattcaagctgctcgtcaaaagttcccagataaaaagttggttgttgttttccaaccacatactttctcaagaactaagaagtatcaaaaagacttcgaagaaatcttgcgtgacgttgataaagcttacgtaactccaatctatgcttcagctcgtgaagctaacggtgatatttcaagtgaagacttggttaagaatattcctggctcagaagtaattgacttagacaatattgctgacttgactaagaataagaattcagtcattgtctttatgggtgcaggtgatattcctaaatatgaagatgcttttgaaaagttgctttaattgaaagataagcatgaaaaaaactgttctcaataagagagcagtttttattttggctaatctttgattttatctttaagatccagactcttttcgtaaatgaagtaaccaatgatacaagtgattacatcactgactgcttgagcccaaacaataccatgataaccaaatacatctttcatgatttctagtgcgatgaaatagacaacgccttggcgaacgatggccatgataaacgctgcccatgcattaccaactgattggaagacggtagtgtaaactaaaatgataccaacgattggtgtggtaataatagtggcaattaacatataactaccagcgttgatgatatctggttgattcataaatagagcggtgactggacgagcaaataaaattaataatccgcctgaaattacagcataaacaatttgcacaagaatatcgaagtttagaattttctttaatcgtttccagtttttagcaccatagttgtaaccaattaaaggttgtgaaccaaaggcaaaaccaacgattaccaagataacgatactgtaaatcttttgggtgattcccattgcggcaactttgtttgcaccgtatagggctaaagatgagttaagaagtgccataccaaagctttgagcgaagttggtgattgaaccggggatgccgattgctacgatatctttgattgttttgccgctaattttgctatattttagctttaatttgatgtagtcagttttgtataaaacgtagtaaatgagaatagcatcagtgactagataacctgtaacgttggcaatcccaacaccgattgcacccattttgaaaacaaacaagaaaataggatcaaggatgatagctaaaatggttcccgtcattgtagcaaccattgcttgggtagctaaaccttctgttctgattaagttctgcggaatgattgagaagataattggcgcagcaccaattgatattacacgataaaaatcggcagcatcttgataggtggcagcttttgctcctaaaagatgaaggatcggattttccaaaattagtaaaatggctgttagtattaaaccagtaacaaatccaccgatcatacaaaaactgcttacacgtttacttaattgataatttctttcaccgaatagccgtgaaattagtgaagatccaccgagcccaaaaatgtcagaaacagcgattaaaaaagtaaaaagtggagcaccaatcgtaattcctgctactagatttgtatcacccgttttagcaacaaacatcgtgtctgccaagttgtagatcatggtagtgatcatccctaagacgaccggtaatgctagcttaaagtagacctttttaatcggcgctttagcaaataattcatccataaattttcccccacattgaaaaaagcgacctagaaagatactttgaggtaaacctcactattctaggtcgctacgttatatcatttatttaattttagcatattgtgttaatttgtgaggtgattatctaaattaaagttaccttgaaattcatcagtagtgctttcttgatccataccatattcagcatcgtcgccccagtaaatgtattgtgaatttttgcccttggtaccggcaattctgaagtaaagtgcagcgctgtcgcctttaccagtggtcttggtggcatctaccttaactttttgaccaatcttgagcaacttgctagttgacttgagcttattatttaaaacgtggatcttgtttaaaatagtggctgtagtggtgctagaagcttggtaaagagtgttgccgttaacaaaaccaacatttgaagcataaatataagcaccgttgcctaaagcagaaaatggcttgcccttgatagtggttgtattcaaacttctcttcttagatccgctaagatttgcaaagtagaaaaatacgtcattcttagttgtggcgtggattttagctggcgttttaactagcatatatttaggaataagcgacataccgttgaaagtagtgcggtgaccgtttttatcataaatgcgagagttggaactcaagattaaaacattttgcccatccattgagctaacattcaaagatttgatgtagcgttttttaccgatgttaacgtaagaagcggtagtgtagtggtagttcttagaagtttttgcatctacttttttaccttggatcaggataggtttgccataatatttaaaacttgagcctgatttaaccgttgaagcaacagtcatcttcttgccattgactttttgggtagtggtagtggcattgcctttgctgttgaagacttgaactgtgccgttaaaggatttcttgagagtaactttacctttttgtgattgcgtagctgcttgaactgtgtgaacaggttgattgataatggcagctgctggtgcaacactgattaataaagctgctgcgatagttgctaattttttagtagtcatattttgtctgctatataaaacatggaaatatgtagaagaatacgaatttcctacatatcagaaagatatatttttcctttctttgtttcatttactgtcgtcttcactagtattctgatattccaaataggagtaatcacattgactagctcttacagcttaaggacctagcaagccctgtttattttctttattttgccaaagctaaaagatttaaaaccgcattttcatctcgatcattcttgtagccacactcataacagacatactcattatgtttggtaccatgctttttattgccctgcaaagtgatcttttcctcgccttttttgacataaccgcacgcagcacatctttgagttgatgggtatgttttatcagccgagattaattatttgccataccaatcacacttataagttagtattcgtctaaacttgctaaaaagtgatctctacattccttttgaagctacatgcgtcatcatcatttctttgactgccaaatcttcaattacaatttgatcgtaattattaacaagcttagtagtaaatttttgtaatagatcgttttgaatattagctgctttgcgataatctctttgcagtttggttctcactgcaaagtaattatttgattttgtagctaacttaccgttaacttctcttttacgtgccagcattctttgataatgcttaatacgcttataaagcttttgcaatttaacaggcaaaatattgatttgcccctcggtatagttaaagtggccaacattgacatcaactgctgtcttttgctgggttttagcttttagttcaatttcttcttcataaggaagagccgcataataattatctttttctttgaagacacttactactttgacttcatccatctttagagcttcatagcttcatagctttttaaatcaaaccaaggctcttttgaaatgcttcttgggcgatcaaggcgaagcttaccattaacgatcttagctctatcagttttaaagccttgtctgggagctttcttagatttaaaactaggtattccccaatcaggttgtgacttatcaaagaagttcttccaagcattagctaagtctttaatcgctaattgtaaacatctggcagacaaatcatattgccagtcggctttatttgcgactagttcatcacggactctgcgttcgttaggactgggattatctttttggtttaatgtatgagcttcatacattaattgccaagtttctaagcctttattccagcagtatcgacgatagtcgcatagagcatcaagatgcttttgcatggtcttattaacttttagcttaactacttgtgtcttgatcgtcatttaagtactcgcctctaatctttttcttgtactttcttaagccatatagtctgcatgaaaacacatgaattatacttatcagatcatcaaccagttctttatcaggactagtgtcaatattattcaaaacaattatttcagtcccatgctttttacataggttttcaaaccaatcatagccaaaacggataaatctatctttataagtaatataaattttatctattttgttgttcattacttcgtctagaagattattccatttttgccgtttatagtttaagccgctgccaatatcgcttatttcttcgtctaatacgataccttgtgcgttagcgtattgtcgaatatggcttaattgatcttttaagtcatctttttgaccataagttgatactctggcataagcaacttgttttttatttgagcttagattatttttgctcaaatattgatatatttgatcttctgtatagaatctgcgattagtaggagagcgcttagctttaagaataccctttcgatcccatgtttggagggttctagtggttattcctaaacgatcagcgacatctttaggttttaaaattgtataatattcacttccatgtttaaatttctaatgaatattatggcaaatatttctattatattctataaatttccatattttgttaacagttaatcagctcctttgtaataatcccttaagttgattttagcacttatgagactataaaaataacctcgaaactcaaacgttttcggggttatttgattttattcacttaagtacttaggatcaataaatttattgatcacgttgttaaccttctttgaattatcgtacttgcggataatgttcaagaagtcttgtgcagttgcttgcttcaagtagtaagtttgatagtaatcgtgtaaagcatcgaagaacttggtttcgcccatggcaacctttaaaacagcagggaagtccatcccaagttcgtaagccatgtcttcagtgtcaacgccctttggtggattattaacagggtagttgatgtagttggccttttgattcttattaatgaattggttagcattttcttttaagatcttgttagcacgcttgacgttcttacgagtatagaacttgctgtgcatcagtttagcacagtaggccttattcttagtgtaggtcaaatcgtaaacgccattttcaaggaggttggtaagaccttcgtcaagccaaggttccatgtattcgtcgctgccgacagtgccgtagaaccattggtgaccaacttcgtgagaaacatcttcagttaattcattatatctatcaagtgggtgcttcttttgtaaaaagccgctggcatcgatcatgatcaagccaggatattccatcccacaggtatctttgccaagcaagcctttagtaatatcgatttctttgtaaggatatttgccgatctttttggtaaaaatgtgaaaactgtcttgggcagtcatcaaagcaagcttgttgtattgcttgctgtttttgcttgcaaggtagtagtcgttgattcttacgccgtttgcataagcgtggtcaaccttgaacttgttggaagcagcgattgcgaactcacgcatgttgttggcggtaattgtagttttgccatttttggttgtgctttgaccagaagcggcaactttgtagctctttggtgcgaagaagctaacgtggaaattgcttacagcactgttgcggttttcaccagcatcgtagtatgggtgataattccacttaccgtttcacggtcatgttgtaatttgttgccttgatcgtaagatcagccgcagcttgaacttttgagttgaagttaaataatgccgtaatggttactgcactcgacaataaaagtgttgttcttcttttcataattttccatccaagaaaaatttactctaaattattggaaattatcggcataaagtaaatctattttttgatgataggatataatttatgtataagtgaaaatgaatagatataaagaaagaagataaataagaatggttaaaagtattacacctcatttggtttatcacttgaatgggatgcaccatgttgtagcacaagttggtgtagtaaatggtgatcatgtttttgccttgcaacttcttcacagtgcacatgatgtgttggtttatagaaaacatgaaggtttaaccaagaacatcgattatactgatccacacttagtaatgatgggctttggccacacgcaaacctgggtaccagctaatgacaaggatgaatatttcgtaggtgctaaaccaaattcaggcaactggactactcaaattgcacgagtaaagtacccaagacttttaccagaaagatatacttcaaatacacaacttccacgtttgtcacacttgaatcacgtaaccgacgttccttatgatggtcatgatcacttgcacagagtagaagcttcagtttcaccaaatggcaagtatttcatgattgcctcaatttgggatgatggttcaggtcactttggtttgtttgacttaaatgaagtaaaccaaaagttgaatgaaaatggcactaagaacacgccaatcactgatttacattgcttgagtgctttccacatcgacaacttcgataatccaagtgttgctccagatgaagaaatgctacaaatgattgattcagttcaaggctatgctattgatgatgacaagaatatctatatttctaaccaattgtcaccaaagattaaccatgaaactggtgaagtaactacttggtcacgtaagattgttaagttcccatggggtgaaacaaacagtgataactggcaagtagctatggttgatggtattgatttaccagatcgttacagtgaaatggaaagtatccatgttaatgccgcaaatgatatttacttaactgtggcttaccaccaaaagtacattaagggtggagaatataagttaagaactttggaaaaccaaattttccatattactgatttgtagaataataaaaatttaaccaagtaaaaaagtgctgatgtgtctttgcttatgaagactatcagcactttttattcatattaatcagtaattctttctttaccaacagcacgttgttcggaaggattataacctaactcttcaatttcttgtcttttttctttgttattgatttgagaaagaatatcccaaaagttagacttatttttcttaatttttgaatttctgttagttttcattgttgttgccttcattttcactttctataaatataagtatactctgaaaaccaaatctatttttagctattaagatcgattaattcaaaatgaaatattttacaaaaatatatgcaatttatatgtaaatgatatacaatagtatcaaattcagaaaggagtaaaaattatggcagaaaaaacaacaggactttatgtcagaatgaatccagaaaagaaggaaaaggcagaagctattctgaaaaagctggggttaaattcagctacggcaattaacatgttctatgatcagattattcttcataatggtattcctttcagagtagagattccgaatgcatgggataatttagatcaaatgaataagtatgaatacgccaaactgcttggcgagcgcctgaacacattgagcggaaggaaagatttgcttggagatgtcgccaagaggcttgatgcggaaaagaatgaaaagaaagacaactaagttttgaggtaaaaattatgatggcaagaattattattggcattattgttgttttagttattgtgtatgtttgttgtggttttagaatcgttccacaaaataatgaaggtttggttgaaaccttgggtaagtattctaagacagtaaaagctggatttatctttgtctggccacttttccaaagaattcgcaaagttccattagcacttcaaccacttgaaatttctaagtactcaatcattaccaaagataacgctgaaatttccactagtttaactttgaactacttggtcactgattcataccgttacttttacaacaacaccgactcagttgaatcaatggtgcaattaatccgtggtcacttgcgtgacattattggtcgtatggatttgaacgcagcccttggctcaactaaggaaattaacgatcaacttttcactgcaactggtgacctgactgatatctacggtatcaaggtcgttcgtgtcaacgttgatgaacttttaccaagtgctgaaattcaacgtgccatggacaaacaacttactgccgaccgtgaaaagactgccgcaattgctaaggccgaaggtgaagctcgtaccattgaaatgaccactaaggctaagaacgatgctttggttgctaccgctaaggccaacgctgaagctgttaagacgcaggctgatgccgatgcttatcgtgtacaaaagatgcaagaagctttgtcaaaggccggcgaaggatacttcagaaaccagagtttagacagcttcaaccaattagctcaaggtcctaacaacttaatcgtggttggcaaggatgaaatgactgacttgggtaaggttcccgctttgaaaaaggtgtgggatgcaagcgacgataagaaagatgaataaaaattagctcaattctcaaatgaggattgagcttttttatacttttaacgtataccagcatcaatattaagtaattttcacactctcttgctcgccttatacttgtagtaacaattgagaacaagaggggaaagaaaattatgtttggtcgtacttattcagatttaggtccagttgttggacaaattaatggtgaagatattcgcgcaaatcaattagaaagacgtggctatgattgggaaaatggttatggcactccatccgatggccaagatactaatcgtgatggtcaaccagttagaaaattaactaaagatgccaaaagcattattatcttttggtcgtgttccggttcaactaagttgctcgcaagtaaagttgcgtgtgaaaccggtgctgatattttagaaattactttaagaaatccttatccagcaaattaccgtaaaacgctcaatcgcgctaactgtgaaagaattcaaaatgattcatcagagcttgagatgcagttacccgatttgagtcaatatgacacaatttacttaggctatcaaacttggacaatgactttgagtcagccaatgaaggcattcctacttgaatatggtggcgaattttctaacaaggagattgcgccattcctttctgaaggtggatatggttcgggtgatagtactgaattgatccgtgagtttattgcacgtgatggtggtaaaaataaaaaggtcgattggacatttgttggtccagaaaatgtcctttgtgctggcattactgataaatttgaaaaggcaggacaaaagattttcggccctaaccaaagaacggcacaattagaaggttcaaaggattatgctctgcgctttatgaacaaatatgatgttccaactgctcgccatgaaactttcaccagcgctgaaacctgtattgccgggttaaaggattttgcatatccggtggtgatcaaggaagatggtttagctggtggcaagggcgtaaccattgctaagaatcaagacgtcgctgaagaaacgatcagagaaatgtttgcatgtggccaaactgctgtcgtgcttgaagaatgcttggttggtccagaatactcaatgtttgtggctgtttctgaagatcaatttaccattttgccaatggcgcaagaccacaagcgagttggcgatggtgataagggtcctaacaccggcggtatgggctcatattctcctttgccacagttgaaaaaagaagatcgtcaaagaatgatcgatgagatcgtgaagccaacgatgaatggcctggttcaaggcgattatcactattgcggtgttttatacatcggcttgatgatgacagaaaatggcccaaaggtcattgaatataatgtccgcttgggcgatcctgaaactcaagttgttttgcctcgaattaaaaatgattttgccatggtgattgacgcagcggtaaatcatgaaaaattgcctgagattgaagaaaatgataattctatcttgggcgtggttgtctgcagtaaaggctatccagcgcacccggcacctaacgtgaagatcggcaagttgccagaaggtaccaatacctatatcgattatgccaatgtgaaaggcgaattggataatctgataggtgatggtggtcgcttgttcatggtgatttcggaagctgacaatttagtccaggcgcaagataatgtgtactcttatttgagtaagcttgatctgccagattgcttttaccgtcatgatattggtaatcgtgctttgagagattagatgtgtgaagaaagtcccggttggggcttttttagtttggtttaatacgaacgcttggtcgtatttgatgggatcaatgataaaattttctccacataagtggaggttttgaggatcagtcgtctaacgggcaagacaggcttagttaataagcaagatatgggtccaattcccgtcgtccttaatatttgaataaagtaaaagctcttagttgtgaaaactaagggctttttcgttgtgtgtcgggcatggcatttgtctagtctagtgaaagtctagatcacgggtagttgtcgccaagtgtagcgaaccacaagccgttagcggtgacgctatgggtgaaggaagtggctagcgagttttccgagcctacgtacagaaacctggtcaggccaaatggtggatgagactgcagcacaagttaaagtccaaaggacaaccgtaaaaccaagacggtaaaccagggggcagtggaaaattaaagatgaatgtcttaccccgagagatctcgtggacaggtgaaaccgagtaagctttaatatcagcgatcgtaagcctggtcgaaaaaggttaatcgcgagaagtcagctgaggtcgtagtagtgctgaaggttttgtaatgaaactggagcgaagggcctaatgtttgtaagagcatatctcgctataagcaatgttcagacagtccggataagaggatagcctagcacaaagagaacgtaactctttgatggtgaaagcaattgggacaattctgaataaatttacaagtagaaatggagatatcacgagatggaactaattgaacagattttaagtcaaaataatctcaaggaagcaatcaggagagtcaaaatcaataagggagcgcctggtgtagacaggagaacagttgatgagcttgatagctattttaaaaagcatcaagtagaaataaaggacgccatcatgaagatgaagtatcgtccgcaagctgttcgcagagtctacattcctaaagctaatggtaagaaacgtcctttaggaatacccacggttgttgaccgagtaatccagcaggctattgcccaagtattaatgaagatctatgatcctcattttagtgagcatagctatggctttagacctggacgcagtgctcatgacgctattgaacaagtcttggaatatttaaacgaaggctatcaatgggttgttgacctggatattgagaaatactttgacacggtaaatcatgataaattaatttcaataattagagagcaagtaaatgacaaaaccaccctccatttaattcgagcctttcttaaagctggagtaatggaagatggttgggttaagcctaataaactaggtgtaccacaaggcggccctctttcaccaattctatccaatatctatttagataaaatggataaagaattggaacaaagaggcctgcgctttgtccgctatgccgatgactgcaatatctttgtcaaaagcggtaaatcagccaaacgtgtgatgaattcaatttcatcatggctagaaagaaagctattcctaaaggtaaacgcaaccaaaaccaaagttgtacgaccaaccaagagcaactttcttggctttaccttctggaaaagtggcgaatactggcaagcaaagccaggagatgaccgcaaaatcaagctttatgacaagatgagagaacttctctgtcgcagaaaagcagctgctcagcctctatcactagtctttactaagataaatcaagtagttagaggctgggtcaattactttagagttggcgacatgaaatattttctaattaagttcagtcaatggctgcgtcataaagtacgggtggtaatcattaaacaatggaaactaccaaaacgaatatacattaacttaatgcggattaacaaggcactaaagtgcaattttagtgatgaagatattcataaagtagctaatacgcgcttaggttggtataaaagaagtacgggttatgtcattaactttctgcttagcccaaaagtattgggcataagcaaagcggatcgcccaggcttggtcgatccgctagaatattatttatctcgtaaataatcacaaacgtagcgccggatacggaaccgtacgtccggtgcaatgagaggggcgagttataaaactccctctactctattacctaaataatttcctataaaagatctaagtgttcattctgaagatttctaatttcattaggtgtatgaccatatttctttttaaagccattataaaatgaagtcttattagtaaatccaactcttcgataaagtacgtctattggaaatgatgtaaataataagtcatggtaaatgacagttagacgtttatccaataaaacgtcatgaaaggattgacctatattctgcttaaaaacggtgcctaagtaagaaggattataattcaattctttacctaattgtttcagtgaaatattcgtataatcttcagctattttgctaaatatttgttgagataacccttctaactgttgaggcttctttattttatgattcttcaatgctctttgaaattgacgattaagtacttggagtaaagatttgacagtttcaatattttggattaatctgtattttgcttataataaaagcaatggtaaatatttatttttagttacttaaacttcccacactaaataagccagtaatctcttgatcttgcttggctttaggcttctatattatttttgctagttttctttaacaatttttgcatgtatttgggtaaacgattgataaagtcagccgtgaattcagctatttgtgcttcactggcatgaaagacttgctttacgctggccagcattgcatcagtaatcaattgcaaggaatggctaaaagtaatgtccgccagctcatcaatcatgcaatagaacagctcgcctagcgtgcgttcatcttcatcgtcccgcttggcaactgacataagcatgtagcgagtaaaaactatggcaacatgagcggtcaaagcatcgtaagacaggccatgatattccgtacttagttttagataacttttgcaagttttgaaaaaaacctcaatatcccaacgcttgccgtagttgcggataatttcatcttcgctaagcgacatgtcggtacaaatgattgccagccaatccttgcgattggcacggtttctaacgcagacaatccgtgcatctattttagcaccgtctttgtcctggcgtccgactttgactgggattgacagcaggtagcgagaacggccgcatcgctttttacagctgcgataaatctgtttgatgtttttgcgttctccctcaaattcatatttgattttggagctaaccttaaccatggcaatcacatccagcttcctttgcttgagctggacgatttgatgtggatttgagaaccagctgtcaaacagcacgtacttggcttgatgacctgctttcatagcttggtcgattaaattaaccatcacgtctgtgcctttagtccgggcaagcatacgtctttggccagcaatggtgcgctgatcaaaaactttattttcgccaatcatattctgtagcttctgagaagacagcagcactgaattgattggcatgaaagaagctccatcagtccagcccagggtcatcatgcgaaaacctttcttgtaagtcattgatacatggtcaaaaactttggcgactaattctgttttcttgaagccggtcctagagaagtaggaatcatcgacaacaaagcaatcagcccgtttttctgaagtcaaagatcgcaagtggttattaatgatttgcgcagacagacgtgtggtgaagtggagccaattgacgtgaacgttgcgcataaaacggtaatatgagttcttggaaaaattttcttgaaaatgatccattttcagctgcatatataagctgcggtcacgaaagacattgcttaaaacgtaaagaaacaagctgaacaggctaatgcctttttccttgcggaagccacattttctcaacagcttgatcacctgaaacttcttgatgaagctgatgattgagtttgaaaatagttgttcattttgttggtcaggagatggtaaaatagacattggcacaagcctttcatgcaaataaattatgttttggtcaatataattatagcaatgaaaaggacttgtgccttttatatttgtcaaaacacgcagaatcacaatgaaacaagcaattttgcgtgtgggaagtttaagtagttaatgaaaggcccaaaaaatatgttatctaaaagaaattatcaagaacatcttcggaagatggcgccaaaaaaagagcgtttttctattagaaaattttctgttggagcagcgtctgttttaattggatttacttttgtgagtatggctggaagtcacaaagttcaagctgcagacgtacctgataaatctgtagtagttgacactttcaataaagataagagtcaagagctaacagaaaataagactattgaaatgccaaaagcagaaaaaacggctgttagttctgtagtacaaaaaggtgcctctgcaaataaaattgaagcagaaaatactacacaagttgataaaaatacagaaggttctgtaaaggtacaagaaaataaagacgcagtacaacctaagactgttaataatgaaaatgtattaaatgtatcaaaagcacagtctcaatctaatgaagctgtaactaagaatgcagcagaatcaaaagtagcagcactacgtgcttttagagcagcacctcaagctactcaatcacaagatgccaaggatttccaaagcttagttaatgccatgaatgatagtagcattggaactattaatattaccaatgatattactattaccggtaaagttaacggccttactacttctggtataagtgatataaacaagcactacctttatctgcagtctaaaggttcagctcgtgacttaacaattaatggtaatggtcacactatcaactttgccggttacagtattgctttacaagacgagaactaccacaatgctgctggcccttggaacattactttaaaggatatgacgattgagggtagtaagtatggctattcaccaatttcattctatagcagcaagactaatactgaaaatagtaaattaatttttgatggtgtcactgctaacttgaatgatcgtccattagttgacaagtatggtgaaaacttaccagttcactttgccggtgataacaacattatgcttaataatatgtcaattggttacaatctagtaactggtaagactgtaaaatttgactctggtaatactacttttaatgttggtggtaaagtaactggaaatgctattaatcctgacaactgggtaattcgttcaactgaaaatgctagtaatagtgaaaatccttcaactttaattaatgaaggtgcaactgttactattaatgctaaatcagacgacttacgtggtatttatgctgggcgtcaactaacagctggtcagccaatctatggcgttactgttattaatggtactttgaatgccaacatggcagctggtcactcaactgcaatttggtcacatgatcttgaaattggtaaaaagggtaatgtaactatccataccaagcaaacaaatcaggctgatggtgttgaaaatggtacttctaattcagtaactaattataatggtacccactatgctccaatttcattaggtgttggtccaataagtagtgttgccagtccattatctaagcaaactgccagcttaattaacaatggtagtttgactattatacgtgatactactgaaaggacattggtaccattaatttcaatgggtgacggtggtttaagtactaataccacgttgaaatttggggttagtgccggtgctactctcgatttacaagacaatgcaggtacatttcaaaatggtactgaacctaacacaccattgaatggtttgattactatgtggggtacgagtggtacagatttattggaatttcttaccccagcatatgtcaacttacaacgtactggtaatattcgtggtacattgattagaatggaaggtgtctacaacagtactactgttaatggaccaacaccagtggctcaatgggatcaaggtaataagactactattcctaatgatgtttggtatgtaagatacctgatatctgcgaaccaatggggtaataactctggtcaatttatgagtaaagatcaacatcctaatactgtcgttgcgcagaaaggtgttgatacactttataactctaatgctactgtcttaatgtctaagaaccaaggcgctgataaatacgaaaacggtacaatgccaactgaagtacaacaggcacagcacttgaacagcttcttaaacaactttaacttgtggcgtccacaaagaatggctatgggtagcaagttgaatgatagtcctgacgttaagattgatgattttgataagtatcacccagaagtgcaaacgattgatggaactactcgtcaaacattaagtgatcttgatgctaataagggacttaaagatttaattggtcctgatgaacaaccaatcactgacttcaaggatattgttaagcatgttacttggtacaattctgcaactgataaggatgaatggaacaagatcatgatccagccgactgacagcaaggatccaagtgcccgagttccttatccaaaaccacaaaacccaacaggtaatttaaagactactgatggttttgcttgggctaaggtaacttatgctgatggttcagttgactttgttaagattccacttaaggttactgaaaagaagtatagtgaagaattaacaccatcttatcctggtgtttccgttgagcaaggtaagtctgatagcgtagatccaagctttaaggatgaaaacgataaggctgctgatgctccagcgggtactaagtacactgcaggtgaaaatactccagattggattaaagtagatcctgatactggtaaagtaactgtttcaccaactgatgatactagtgtaggttcacatgatatttctgtaacagtaacatacccagatagcagcactgaccaattaactgtaccagtaactgttaccgaaaagagtaacttagctgagaagtatccagttagctacgacaagttaaatgttgaaaagcctagcggcgacacaccagcaactggtgcagtagatccaaaggctgctgcagatatgccagaaggtgcaatcactggttacgaaaaaggtgactttgatgctccagcgggtgtaactatcgatgtaaatcatgatactggtaaggtaactgctagtgtaggtaaaaacgcaacattaggttcatttgaagttccagttaaagtaacttatagtgacggtacttatgctgaagtaaaagttcctgtaagtatcactggtaacaaggttgatccaggtagtggtgacgttgtttactacggtgatcaaagtatggtggtcttcaatggcaaccttactactgttcacaagactactgatagccatgaattaagtgctaaagacagtgccttccaaacaatcacatattactctgattggaacaagaaaggtaacatcgttagcgactataacaagcatgtgatttacaagctaagtgctgatggtactaagtatgtaaacgaagctgatgctacggacagctttgatgctagtgcaattagctttaactggcagaagggttatggagttaacactggtgttgataactttagcaatggttctgcagacacactttaccaacttgaaaatggtgctgttaactctgaagagcaaactgatgccaatgatccatcaggtttagcaggtaactctaagtatcgttacgactttagtattagtgatactaatgtattgcaaaaactaggtttatcacctgctggttacaatgcttgggctaatgtttactacaacttccttggtgcaactggtaaaattaatattccagtaaactatggcagtgaagtatcaactgatgaagctggtattaagaattacttagcaactaacagtatctcaggtaagacatttgtcaatggtaacccaactggtattaagtgggctgaaaatggtatgccaggtaaagatggcaaatttgctgcttctaacatgactgggattgttgaatttacttttgataacggtactaagttaaatgttcaagtaacatttaagactggatcacatgttccaacttcaggtagtaaagttaatgacgatactaacctttatgtagaacgtacaattgaatatgatgtaactggaactggtcattcaccaattaactcagtaacacaaaaggttcactatgtacgtgatggataccacaagattaatgctgatggtacagatgctggggaaattatctggaatgaatggaaactggctgatggtcaaactgctgaattcccagaatacagtgttgaccaaatcacaggctatgatgcatatatcaatggtgcaaaggctactcaagttgatgctgccaaagttgctgaaacaaatggcacaccacaaaatggtcaaaacatcacaaaaagcaaaatagtactccagtaccatacaaaccaggtaaagatggcgtaaacgatgccattaacagatatgtaactcgtacaatcatcgttaaggaaccaggtaaagaaccacaaactaatactcaaactgttcacttcactaataaagataaagatggtaatagtggctacaaggatccagtaacaggcgagattaaatacaatactgactggcatgtagcaagtgatttgaatgctaagactggtagctgggaagaatatacagcaccatcagtaacaggttacactccatcacaagctaaggtagaagcaaaaacagtaactgcagaaactgaagctgctagcgtaacaattagcagatattccggtaccatacaaaccaggtaaagatggcgtaaacgatgccattaacagatatgtaactcgtacaatcatcgttaaggaaccaggtaaagaaccacaaactaatactcaaactgttcacttcactaataaagataaagatggtaatagtggctacaaggatccagtaacaggcgagattaaatacaatactgactggcatgtagcaagtgatttgaatgctaagactggtagctgggaagaatatacagcaccatcagtaacaggttacactccatcacaagctaaggtagaagcaaaaacagtaactgcagaaactgaagctgctagcgtaacaattagctacactaagaatgcagatattccggtaccatacaaaccaggtaaagatggcgtaaacgatgccattaacagatatgtaactcgtactatcaatgtagttgatccagtaactggtaaaattagtacaagtgtacaaactgctaagtttactcgtgaagataaaaatggtaatagtggctacaaggatccagtaactggaaagacaactataaatccatggactccggctaaacagggactacgtgctgttaatgttgagcaaatcaatggttatgtagctaaagttgatggtaatgtggacgcagtagttgtaactcctgattcagctaatatggtagtaactattacttaccaagctaataaaccagaaggtcaaaacattgctgttaagaaagatacagtaccagatccagcagatggtattaagaataaggatgacttaccagatggtactaagtacacatgggagaagactccagatgtaagtaagccaggtgatgtaccagcaatagtagtagtaacttatccagacggttcaaaggacaaggtagatgttcatattgttgtggataacccaaccccagagccacaagatgttcacactactccaggtgtagtaccagacccatcaacagccatcaagaataaagatgagatgccagatggcactaagtacacatggaaagaagttccagatgttaactctgtaggtgagaagactggtatagtaactgtaaccttcccagatggcacatcagtagatgttaaggttaatgtatttgttgatcctgttaaggaaaataacaatacaattgcagattcaaacaatactaattcttctgataagaatactgcaaatgctgcaacagttaatggtaagtcagaaaacaagaagactttgccacagactggttctaagtcagatgccgctgcaattgtcggtttagcagttgccatcgcaggtagcttattaggcttaggtgttaacagaaagaaacgtcaaaagtagaagaactatttataattgatccaaagaaagattaggtgataaacctaatctttttttgtgccttaatttgttatttgatcatgtttaataatttttccgtaagcgtcgtaagcgtcatataaccgagtatcttttttagtccgtatttttcaggtattctaatctcatcaatttaatggaggttaagaatatgatcgaaaaacaacaacccattgtggcacttggccgttcttctaaacctaagaaggctcgtccaccacgcaataatctgttgcttagtttaaagaagaatgacttagagctgaatttttacagcagcttagaccctgaaattatgaataagctgcttgagaaagtcttgccatgattaagctcagtgacttagggcaagtctatatcgtttgcggcaagacggatctgcgtaaaggcattgatggactagcaactttagtcaaagaacagtttgaacttgatccttttagcggcaaagtcttcctcttttgcggcggaagcaaggaccgcttcaaagccctttattgggacggacaaggtttttggctgctctacaaaagatttgaaaatggaaaattgaactggcccaggaatcaaaatgaagttcaagctttatcttctgagcaggtcgactggctaatgaagggcttcgcaatcaatccaaaaataaagaacacgaaagcgtgcgaattctactaacacttgacatcgcacgcttttttgatattcttttaactaataaatttaggaggaagtttaactcatgtcacaagaaaatttggaaaagattattgcacaacaagcaactactattcaaaacttaactgatgaaattaagctcctccgtgaacaagtagcttacttaacgcaaaaacgttatggcaaatcttcagaacaaatgcctttaaatggacaaacaagtctctttgatgaacctgatgctcaagatgacggagaacgtccccgacgccgccgttcagactattacttataaaagacaagctcacaaacgaaagcgtgctgacttactagctgcccttccagctgaagaggttcaccatgaattaggcgacaagcattgtcctgattgtcatcatgaactgattgagataggcaagcagtcagttcgccaagaattattgtttatcccagctcaacttaaaaggttagaccatatccaacatgcttacaaatgtaaatattgcagtcaaagaaatcttagcgacaagatcattaaagctgcagtacctaaagctcccctaaaccatggtctaggttcagcttcactcatcgctcattcactttatcaaaaatatgaaatgaaggtgccggactatcgtcaagaaagcgactggaagaagatgggactagaagtttcaagacagatgttaaattattgggatttgaaaagcagtcaatactactttaaaccagtgtatgatctgcttaagcaaaagctgttaatgcggccaattttacatgccgatgaaacttattatacagtcttagaaagtaaaacaatcaagacttactattgggtcttcctttcaggcaaacatgatcaatacgggattacactctatcatcatgatccttcccggagttgcaaggttgccttaaactttttaggaaactatcccggttatttgcactgtgatatgtggcaggcttatgagcaattgccgaaagcaactttagttggctgctgggctcatgttagaagaaagtttcacgaagccgtaccacaacaggcttctgaaaagtcccttgcccaaaaaggactcaactactgcaatcgcatgttttacttagaacaaacctgggagaatttgagcaaacaagaacgttaccagctaagacaagcaaagctcaagcctctgatgcaagagttcttcaattggtgtgagaaaaataaaatcaccgttttgccaggctctaaattgggaagagccattaattataccctcaagcatcaagctacttttgagcatgtcttgcttgatggcaatttagaattatctaacaataaggctgaacgcgctgtaaaatcactcgtcatgggccggaagaattggttattttctcaaagttttgagggtgctactgcaagtggctttattctaagcttaattgaaactgccaagagaaatggccttgatcctgaaaagtacttgaattatttgcttcagaaattaccgaatgaagagattctggattcggaaacccttgaagcttatttaccgtggcaagagaagatccagataaattgtaaataaaagaacttaaataaccgtctcagtataacagtaactgggacggtttttaagtacactattttatttgacgcttacaaaatatatagaagaagtagataaacaaatggaggcattaggtgagtttttctttataacaaattattcaggaattaaggttaagtgagtatggaagaagtatttaatgatggtatttacgaatgcatagtagtagcaaccacggtagaaaaatataaggtaacttccaaagttacaattattctacaaattagagatgatattgatgccgttgaattaaaaaaactaatagaatttatgctggatataggttaaaactagaatattggcaaaaaaagatttcgcatactttcaatattaataattttcaatatttgtgttatgcgtgtggccttccgagaccgtaaaatagtttgtgtaaggatgaattattccttaatttaatttcctaaaacattagaaaaaggagttcctttctcgtatgattggtttgaacaaaaaaaacatacagaaagaagaactccttcatgaagagactgtaaaatagtttgtgtaaggatgaatgattccttaaatttatttctttaaacattagaaaaaggagttcctttctcgtatgattggtttgaacaaaaaaacacatacagaaagaagaactccttcatgaatgattttaccaaagattttgctcaagctctattcaatccagacaaaataaatgatttattgcgcaaagagctacaacaggctgttaataacttgctagaagctgaattgactgcctttctgggctatgatccctatgccagaaatggctggaatactggcaactctagaaatggtgcttatttccgcaaagttgatacgcaatttggcccaattgaagtgcaagtgcctcgggatcgcaacggtcaatttcatcagcacacgctgcctggctacaagcagcactcggatatcttggaaagcatgattatcaagctttactccaagggcgtgaccaccagggaaatagccgatctaattgaaaagatgtatggcagccattacagtccagctcaggtatcaaatatttccaagcagatgattccaaaggttgaggcttaccacaaacgcaagctaagcgacaagtttttctgcgtctatttggatgcgacataccttcctttgcgccgagaaacatttgagcgtgaagcagtctatattgccattggcatcaagcctaatgggcacaaggaggtcattgactactgcattgcgcctagcgagaacattgaagtctggacagatatgcttcaaaacatgaaatcccgaggcttaaagcaagttgagctttttctttctgatggtgttgttggcatgaaaacagccttggccaggacttatcctaaagctcattttcaacgctgtttggttcatgtcatgcgcaatatctgcgctaaagtacgcgtcgacgatcgtgaaaagatcatgaacgaattcaaacaggtgcatcaacagacaaacaaagaagaagccacagctgtcctgcatgacttctataccaaatggggcaaggtttacagccatgttatcagaagcttgaaagacatagaaccagatctgctggtcttttataactatcccaagcagatcagagcttcaatttattcgactaacatgattgaatcatttaacaatgtgatcaagcgcaaagctaagcctaaggcatagtttccaactgaacagtcgcttgatgcttttattggcattcaggcaatgagctacaatgaccgttatttcaatcgaattcataaaggctttggtcaggttcaggacaccttagaatcctactttgattaaataaataattaaaaaatcaatttacgagaaagatctatttacacaaaagatttgacagtttcggaaaatcaactactttaagaatgatcgcgggtttggaaaatattagtaaagggactttggaaattgaccatcaagttatgaatgacgtcgcacctaaagatagaaacattgctatggtttttcagaattatgctttgtatccacacatgaccatttatgacaacatggcatttagtttaaaacttcgtcattataaaaaagatgaaattgataaaagagttaaaagagctgcaaatattttgggattacaaggctatttaaagaaaaagcctagtgcactttctggtggtcaacgtcaacgtgtggctttaggtcgtgcaattgtacgtgatgcacctattttcttaatggatgaacctttatctaatcttgatgccaaacttcgtgtagttatgcgagctgagattgctaaattacatcaaaaattaggcacaacaaccatttatgtaactcacgatcaaactgaagctatgaccttagctgatagagtcgttgtaatgtcagttggcaaggtagagcagattggtacaccacttgaagtttataatcatccctcaaatcaatttgttgcaggttttattggttcgcctcagatgaatttctttaatgttcattataggaatggaagtattacagatggtaagggcttgaatattggaattccggaaggtaaagccaagatgcttgaagaaaagggctatgcagataaagacgtaatatttggaatccgtccagaagatattcattctgaacaagcctttctggaaacatggccaaatgcagttgtagaatcgcaagttgtcgtttctgagcttttgggttcaacgattcaactgtatcaaaaagttgatggtactgagtttgtagctattgtaaattcccgcgattatcacaaaccaggcgacaaggttaaaatggggtttgatgttaataaggcccacttttttgataaagacactacccaagccatcgttaattaaatattatttttctctccccctagataaataaaacaatgctttaagatagttcactattggaaattgacaataatgaactattttttgtactaaccatctatggaaaaatgagaaactgtcaaatcttttgtgtaaatagatctttctcgtaaattgattttttaattatttatttaatcaaagtaggattctaaggtgtcctgaacctgaccaaagcctttatgaattcgattgaaataacggtcattgtagctcattgcctgaatgccaataaaagcatcaagcgactgttcagttggaaactatgccttaggcttagctttgcgcttgatcacattgttaaatgattcaatcatgttagtcgaataaattgaagctctgatctgcttgggatagttataaaagaccagcagatctggttctatgtctttcaagcttctgataacatggctgtaaaccttgccccatttggtatagaagtcatgcaggacagctgtggcttcttctttgtttgtctgttgatgcacctgtttgaattcgttcatgatcttttcacgatcgtcgacgcgtactttagcgcagatattgcgcatgacatgaaccaaacagcgttgaaaatgagctttaggataagtcctggccaaggctgttttcatgccaacaacaccatcagaaagaaaaagctcaacttgctttaagcctcgggatttcatgttttgaagcatatctgtccagacttcaatgttctcgctaggcgcaatgcagtagtcaatgacctccttgtgcccattaggcttgatgccaatggcaatatagactgcttcacgctcaaatgtttctcggcgcaaaggaaggtatgtcgcatccaaatagacgcagaaaaacttgtcgcttagcttgcgtttgtggtaagcctcaacctttggaatcatctgcttggaaatatttgatacctgagctggactgtaatggctgccatacatcttttcaattagatcggctatttccctggtggtcacgcccttggagtaaagcttgataatcatgctttccaagatatccgagtgctgcttgtagccaggcagcgtgtgctgatgaaattgaccgttgcgatcccgaggcacttgcacttcaattgggccaaattgcgtatcaactttgcggaaataagcaccatttctagagttgccagtattccagccatttctggcatagggatcatagcccagaaaggcagtcaattcagcttctagcaagttattaacagcctgttgtagctctttgcgcaataaatcatttattttgtctggattgaatagagcttgagcaaaatctttggtaaaatcattcatgaaggagttcttctttctgtatgtgtttttttgttcaaaccaatcatacgagaaaggaacccctttttctaatgtttaaagaaataaatttaaggaatcattcatccttacacaaactattttacagtctccaaaaatgacaaagtaaatttgcaagaatagagttttattttaatattaatatttactagatatagattaagcaatgaaatgatgattttaaagtggtatgacacagattataaaacaggacatctgagaagcggtaatatggttaccatatttatgctgatagccactgttgccaagattgaagtaatcttaaatagtaatccacattggtgccttccaccatttaatgaatttttgtttagtagtgagataaagcgtagtgtgtttaagcctgatgatgagttgaaacaatttattagagattttaataagaaacaccaaaaacaaaattgataaatttccacttgtaactactattcttgtttaatatcttttgatatagttttaaacaagaggaaaaacaaatgttttgtcttaaatcattatttaactcatgagaatgtaaatacgataagcaatggtttaaaatcttcacgacgtccattttttatttaacttaagagaattacaattaaagctccaatcggggcttttttctttttcattaaacttcctattaaaagattacccttgaaactggtaaaatagataagtaagtatagagaacaatttttataaaaggggaataaaatggcagataaaaaattacttctaatcgatggtaactctgtagctttcagagccttttacgctctttatcgtcaactagaatctttcaaaagtccggacggcctgcacactaatgccatttatgcttttaaaaatatgcttgatgtccttttgaaggacgttgatccaactcacattttggtagcttttgatgcaggaaaagtaacttttagaacaaagatgtatggagaatataaaggtggacgtgccaaaactccagaagagcttctcgagcaaatgccttatattcaagaaatgcttcatgacttgggtattaaaacttatgaattgaagaattacgaagcagatgacattattggtacttttgtcgataagggtgagaagaacggctttactactactgttgtgactggtgaccgcgacttgactcaactcgcttctccaagcactactgttgaagtaaccaaatcaggggtttctcaacttgaagcctacacgcctgaacatatgaaggaagttaacggcgtcactccaactgaattcattgatatgaaggctttgatgggggataattccgataactatcctggtgttgaaggtatcggtcctaagacagcctctaatttgattcaagaatatggttcagtagaaaacttatacgatcatattgatgaaatgaagaaatctaagcgtaaagagcgtttaatccgtgaaaaggacaaagcatttttagctaaaaaacttgccacaattgaccgtgattcaccggtaactctagatatcgatgatataaaacgtcagccagttgattatgaaaagctgcgtcaattctatgaaaagatgaacttccgtaagttcttagctgatttaaatgcttcaggtgccggtcaagatagtactgaagttgaaaaagtggaatacatcgttttaaacgacgacaacgttaaggatgttaaggctactgaagatgacaccattgagttttatctagaaatgctcggtgctaactatcacttagctccttttgttggcttcagcttgaagatcactgacaagatctacgtttcaagagacgtggaattgcttgaagaagataatatcaagcacatcttagaagacgaaaagattaagaagaatgtctttgacctgaagagaacaatggttgctgcacatcgtttggacattcacactcacggccttgattacgacatgcttttggcatcctacttgatcaataatgaaaataactctaacgaccttggtgaaattgcccacctttatggtgattactccgttaagactgacctcgaagtttacggaaaaggtaagagcgagcacatccctgatgacgatgatgaattattcaaccacttagcttctaagatcaatgctatcgaatcacttaagaagccactgcttgaaaaactcaaggatcatgaacaagacgacctatttgaaacaatcgaaattccaaccgcgcgcgttttagccagaatggaaatgaacgggatgaaggttgaagcaagtactttaattcaactgcaaaatgaatttgccgttaaattgaaggaactcgaagacaagatttacagtcaagctggtgaaaagttcaatttgaattcacctaagcaattaggtcacattttgtttgaaaagcttggtttaccaccaatcaagaagaccaagactggttactcaacttcagttgaagtcttggatcaattaaagacgcaaagtccaatcgttagtgaaattttggattaccgtcaaattgccaagattcaatctacctatgtaaagggtctgcttgacgttatccaatcagatggccgtgttcacacgcgttacttgcaaaccttgactgcgactggtcgactttctagtgtggatcctaacttgcagaacatccctacccgcaccgaagaaggaaagcaaatcagaaaggccttcgtgccaagcgaaccagacggctacatcttctcttgcgactactcacaagttgaactccgtgttttagctcacgtttcgggcgatcaaaacatgcaagaagccttcaagaccggatacgatattcactcacacaccgcgatgaagattttccacttggattcaccagatgaagtaacgccattgatgaggcgtcatgctaaagccgttaactttggtattgtttatggtatttctgattatggtttatcaaagaatttaggtatttctagaaaacgtgctcaagagtttattgacaattactttgaacaatatccacaaattcgtgaatatatggataaggctgtgcaaacggctcgtgaaaagggctatgcagaaacaattatgcacagaagacgctacttgcctgatattcatgctaagaaatttacagttcgttcttttgctgaaagaactgcgattaactcgcctattcaaggatcagcggccgatattatcaagattgctatgatcaatatgcaaaagaagctagatgaactacatttgaagaccaagatagtcgttcaagtacatgacgaattgatttttgatgtgccaaaagatgaattagaaacgattaagaagatagttccagaagttatgcaatcggcagtgaagcttgatgtgccattgattgcagattctggttggggtcataattggtatgatgcaaagtaggtgatttaatgccagaaatgcctgaagtcgagacggtgcgacggactttaactccgctaatcgttggaaaaacgattaaaaaagtagtactttggtatcccaaaattgtggcaacagaccataagaaatttatcaaagaactaccaggtaaaagggtcttaaagattgatcgctatgctaaatatttactgatacgcctaagtgataatttaactattgtgtcacatttacgcatggagggaaaatatcatttaaccactcccgatgcgcctaaggataagcatgaccacgtagagtttatttttactgatcaaactgccttgcgttataatgacgtgcgtaagtttggccgcatgcagctgattttaacaggtactgagcgccaagtgacggggattggcaaactgggccctgagcctaatagcatagaattttcgtcagattattttatcaaggccttgagccgtaagaagaaaaatattaaaaatgtcttgcttgatcaaacaaccgttgcaggtttaggtaatatctatgttgatgagacactgtggcagagtggaattcatcctttgagtgccgcaaataaaattccgtcagaaaaagcaaaagagctgtggcagaatattaaccaaactattaaaattgcaacaaaaaagcgtgggacgactgttcatacttatttagatgccaacggaaatgttggtggctatcaagaaatgctcaaggtttatggtcatgcaggtgaaccttgtgcaaagtgtggcacggaactagaaaagattaaagtatcaggcagagggacaaccttctgtccacattgtcaggtggtttattaatgagctatgttttagccttaactggtggtattgcaactgggaaaagtacagcggaccagttttttaaagcaaataaaattcctgtgatcgatgatgatcagattgctcatgatttgatggagcctgggcaagcttcttggcaggcgattaaagattattttggctcagagtatttaaatgatgaccaaacgattaatcgaaagaaattagggcaattggtatttaaggattcgcgggctttaactaaattaaatgagttaacgcatccgttgatttttttgcaaacaaagaaattgctaaatcaatatcaagctcaaccaatagttattcttgatgtcccactttattttgagtcagggatggataagaaagatatagctgacggtgttttagtgattactttgcctgagaaaatgcaattacagcgtttgaaggagcggaatcatttaaccgatgaagaagcaagaattcggatgcaaagtcagttgcctatggtcaaaaaagagcaattggctgattttgtgattgaaaatactggtacaataaaagaactagagaataaactagcacaattattggtaaagattagagaagagggatagctatggaatgtccaaattgtcatcaaaatgcttctcgcgttattgattcgcggcctagtgatgaaaaccgggctattagacggcgcagagaatgtgaaaattgttgttttcgctttactacttttgaacgagtggaaactgctcctttgttggtagtaaaaaatgatggtactcgtgaaccattcagtcgaaagaaaattttgcacggagtaatggcagccggacaaaaacggccaatcagtagtgaacaatttgagcaattggttgatcgtgtcgaaaataagataagaaaacaaggcgttagtgaaatttcatctaagaagattggtcagtatgtcatggatgatttggctaatttggatgacgtagcttatattcgctttgcttcaatttaccgtgagttcaaggatatgtctagctttatgaagacaatggaagatatgatggccaaaaaaggaaagggtaattagtcatgtttgcaacgtctgatcctaagcatctttattatgtagccaacaagattaccctttttccagagaatgagaaaatcttgattaaactgtatcagcctttggttggcgcggtggcaattgccttgtatcagactttaatcaatgactatgatccatatggtattgtttctgatgcaaagggaatttattcactacaggagcaacttgattgtagtttaaaagatatgtttcattctttgcataaactggaagccgtaggtttagtgcaaacttttttagcggataatgtcttcaataatatcattgtttttaagttattacaggttcctagtgcagacaaattttttgcaacaccactgctagcaagtttgttgaaagaaaaagttggcagcccaacctttcatgacttgagtcatgcttttgctaaggaagcaaaactgcgtgaaaagccaatcaagaatgcgcgcgatgtctcagccaacttttttgatgtttttcgcttgccaggggatgaagcaattaatccatctaatgaggtagtagaagctgcgcaggaaaataaagcgcctgaggtagaaactgctgaaattaatgcccaggatccaattgattgggatctgattaaagatcaatataatgtctatcaaattccagctcaagaagtagaaattaaaaagaaccaaattcggggcttaatacagacatataatttatcggaacaggaatttgtggatgagactgttccctgtttgcatggtacacataaattaaacatgcatgaaattagtaataccatagcagaaaattataaacgattgcatactagggaaaacattcaaaaacaaattgaagaaggcaaaaagcgcgctattgcgactatcaaaggtttggacgctaatgatagaaaactgttactcgaagctaatgaaaattccccatctgaatttttatacaaattaaaaactgaaaagggtggaattgtagctccaggcgaaaactatattattaatcagctgcacacgcagtatggcttgccggaagatttgattaatattttgattcatacctgtttgacctacgatactgttgtaacttctaatcgtgcttatcgaatagctaatgattggctgcaaggtggtattagtactggggtacaagctcttgaatatgtgaagaagcgtaaagccgatattcttaaaaagaaaaatcgacagtcatatcgacaaaataagcgagtcgaaaaaggtaccgattggagcaagaaaaaggctaaaaatgaaggtatgtcaatagaacagctgaaggatatctttaaggatctgaaaaataagtaaatagagggtaggtgaaataatggaagcaattggtgatttgcttaaaaaaatagttaaagagcgtaatttaggtaatgagaaagaactgttgaaaactgctttacacgatccagatgtgcaagcgtttttgcaggcaaatagggaaaaaatagataaggcgatgattcgaaatagtatggccaatatctatgaatattatgcgcaaaaacatagtcagaatcaggtgctggccggttatgctccgcaattatttttgaacggcaaagtaattgatgtacgttacaaacctaccgaggctaagattgtagcagatcagcaacgagcagccaagcggcgtcttcatttaattgatctgcctgctaaattgcatgatgttaatttaagtgatattgaggttacaaatgatcgccagcaagctttaaccctgatttatgattttttgaaaaagtacaaagctgatcctcaccaacaaggcctttatttgtcgggcgactttgggatcgggaagacctatatgctagcgggacttgcaaactatgtagcaactaattttgatcggaatgttgtatttttacatgttccaacttttattgcaggtttatcaagtcattttggtgataacagcttgcaagatgagatcaggaatttagctgaatgcgatgtcttaattttggatgacattggggcagaaacattaagtcagtggtcacgtgatgacgttttaggagtaattttacaggcaagaatggataatgttttgccaacctttttctcttctaatttagatatggaagcattagagtcacactttgaggaaacccgtaatgcaactgatccagttaaagctaaaagattaatgcaacgagtacgttttttagctaaagaagtagtagtttccggtcccgatcgacgaaatttttcgcattaatttcaaaaagttcttgcatcgttcactttgatgcgtataattgaagttaattaaacgagacatgatgatgttcggctcagagagaaggacctagttctggaagttcttcattagaaaatcaccccaatcgtttattcccaaaattgaattttaagaggctggatacctttatcaatctatacgagaggttagacgtacgctaacctgaattttgggtggaaccacgcaattaacacgtcccagtgcttttattagcactgggatttttttattggaggtaaaaatatgagtttttcaattactttgccagacggttcaaagaaagattttgataaggctgtttcagttaaggaagtagcttcatcaatcgctacatctcttggaaaagctgccgttggtgctaaagtaaatggcgttgttaagccacttgattatgaaattgacaatgatgttgaagttgctattcttactgacaaggatgaagaaggcttagacattttaagagctactgctgcttttgcacttgaagcagttgctaagaacaagtacccagaacttcgtttgggtcaacatgttgctgatgaaggcggcttttacgtagatactgacaaagatgaccaaattaaggttactgaattgccagaacttgaaaaggctatggaaaaattagttaagagtggtcaagcaattgaacatgttgtaatggacaagtcagaacttgaagatattttcaaggatgacccttacaagactgatcttttgaagaaaattgatgctgacaaggttgatgcttacaagttaggtgatttcgttgactttggctttgatgctttattgccaaacactggtaagattaagcacttcaagcttttgtcagttgctggtgcttactggcttggtaaatcatccaacccaatgcttcaaagaatcttcggtactgctttcttcaaggaagctgctttaaaggaagatttgaagcgtcgtgcagaaattaaggaacgcgaccacagaactatcggtcgtgaccttgacttcttcttcgttgatcctaaggttggtgctggtcttccttactggatgccaaagggtgctactattcgtcgtgttgttgaacgttacattatcgaccgtgaagttgctgacggttatcaacacgtttatactccagtattaatgaaccttgatgcttacaagacttcaggtcactgggcacactaccgtgatgacatgttcccaccaatggacatgggtgatggcgaaatgcttgaacttcgtccaatgaactgtccttcacatattcaaatttataagcaccacattcgttcataccgtgacttgccacttcgtgttgctgaacttggtatgatgcacagatatgaaaagtcaggcgctttgtcaggccttcaacgtgtacgtgaaatgactttgaatgatggccacacttttgttgccttggatcaagttcaaactgaattcgctaagattttgaagttaatcatggacgtatacaaggacttcgatattactgattactacttcagactttcataccgtgatccaaagaatactgacaagtactttgcaaatgacgaaatgtgggaaagaagtcaaaagatgcttaagggtgctatggatgaccttggccttgactatgttgaagctgaaggtgaagcagcattctacggtcctaagcttgatattcaaactaagactgctttgggtaatgacgaaactatgtcaactatccaacttgacttcatgcttccagaaagatttggcttaacttacgttggtcaagatggtgaagaacaccgtccagttatgattcaccgtggtattgttggtactatggaaagattcattgcttaccttactgaaatttacaagggtgcattcccaacttggcttgctccagttcaagttaaaattatcccagttaaccttgatgctcatggtgaatatgcagaaaaggttcgtcaagaacttgctaagcgtggcttcagagcagaagttgatactcgtaacgaaaagatgggttacaagattcgtgaatcacaaacccaaaaggtaccttacactttggtgttaggcgacgaagaaatgaagaacggtagcgtaaacgtacgtcgttacggtactgacgaagaaatttctaagagccttactgattttattaatgaaattgatgcagatgttaagtcatactcaagagaaaattaattaatataattaaaaaataaaataaaaaaacgtatgctatgccaggtctaattaagatggctttattgcatacgtttttttggtaaagctaatgtaattgattttttacgtttgtaagtaagaagtaaaagaactgtcatcccctttaacttttatgaaatattttaatgaaataatgaaaataggagttatataaggaaaggtgataaacttgaaaaataagctcattatatttatgacaactgcgctattcatgttagctattattgtaatgggtcaaaatagagtagatgctgcatcctggggagctaagaatttatttactacaccaaaggaaactcgcggaacatggtactataagcaagaaggcaaaataaagaagcttaaaattacaacgcatacatttaataaaatcaaattatataaaatgttgagcagtaatcaagcgattaagtggactaaaaaattagctaaaactgataaaaagtcggggtataaattagctcaaaaagttggtacctctcaatacgaagctactgattttaaattttataaaacagcaggttttgctgccaatggttggctttctagtgatagagctgattcaggacacacttatgttgctataaagaaaaaagataaaagtaataatgataaagtagatgcactgcggagactgtaaaatagtttgtgtaaggatgaataattccttaaatttatttctttaaacattagaaaaaggggttcctttctcgtatgattggtttgaacaaaaaaacacatacagaaagaagaactccttcatgaatgattttaccaaaaatatagcacaagctctattcaatccagacaaaataaacgatttattgcgcaaagagctacaacaggctgttaataacttgctagaagctgaattgactgcctttctgggctatgatccctatgccagaaatggctggaatactggcaattctagaaatggtgcttatttccgcaaggttgatacccagtttggaccaattgaagtgcaagtgcctcgagatcgcaacagccagtttcatcagcacacgctgcctgactacaagcagcactctgatgttttggaaagcacgattatcaagctctactccaaaggcgtaactaccagagaaatcgctgacttgattgagaaaatgtatggcagtcattatagtccagcccaagtatcaaatatttccaagcagatgctccccaaggttgaggcttatcacaagcgcaagctaagcgacaagtttttctgtgtctatttggatgcgacataccttcctttgcgccgagaaacgtttgagcgtgaagcagtctatattgccattggcattaaacctaagggacataaagaagtcattgactactgcattgcgcctagtgagaacattgaagtctggacagagatgcttcaaaacatgaagtccagaggcttgaagcaagttgagctctttctttctgatggtgttgttggcatgaaagcggccttgaccaggacttatcctaaagctcattttcaacgctgcctggttcatgtcatgcgcaatatctgtgctaaagtctgggtggatgaccgcgaaaagatcatgaacgaattcaagcagatacatcaacagacaagccaaaaagaagctgcagctgtcttgcatgaattttatgcaaaatggaataaagcttatagccatgttatcaaaggtttgagggaaattgagcccgatctgctggtcttctacaattatcccaaacaaatcagagcttcaatttattcaaccaacatgattgaatcctttaacaacgtcatcaagcgtaaagctaagcctaaggcagaatttccaactgaacagtcgcttgatgtatttattggcatccaggcaatgagctacaatgaccgctatttcaaccgaattcataaaggctttggtcaggttcaggacaccttagaatcctactttgattaaataaataattaaaaaatcaatttacgagaaagatctatttacacaaaagatttgacagtttcgcactgcgagtaggaaatggagcagataattcatttttatattattgttataagagcaaaaaattaatcaaataagttacccggatttaaaattgaagtgcaacactaattgttaaacaaaaaggccatgaagacctaaacttgaagtgaccaaaaatcaagaaaggaagatcttcatgaccaactcaaattctagcatttccaagcattatcatcaattgaacagcgaacaacgtggacaaattcaagctctgcttgattctggcataacctcctgcactgctatcgctcaagaagtaggctgtcataaatcaactatcagccgtgaaattagacgaggcagtgtcctgcaaagagacagcagctatgtcttgtatgagcactattacgctgatactgcacaaatttatcatgaaaagcgccgcagaaactgctataagtgtaatccactgcaacactatgccgtttttttcagaatgctaagcagacgctttaaagccaaatttgatgccactagcattgatgaattcgttggtgaatttcacaggattatgccaaattatccatgtcctagcacgcccactgtctatcgttatattgatcaaggattgctggatataagcaatatcgacctgccaatgaagcttaaaagacgcagaaacaaacgccatcatagtcatggtggccatgctccgcataaaaagaatcttggcaattcgattgaacagcggcctaaagaagttgaaaacagaaaagttcccctgcactgggaaggcgatttggttaaaggcgtcagacgtaaaaatcaacctgccttaatgacactgactgaaagaaccactcgttttgaggttgttatcaaaattcctgactatcgggccagtacttgtcaaagactgcttcaaaaggagattgacagacatcctaattggtttaaatcaattacgtttgacaatggttctgagtttgcggatatgaccaaaatcaaaggatgtcagatctactttgctcatccatattctccttgggaaagaggcacaaatgagaactgcaatggacttctgcgtcaattcttccctaagggcaaaagcatgaaagataagtcagctgcttatgttcaacaggcaactgatgccattaaccgcaaacatcgtcgaatcctccaatatcacacagcagaagaactcttcaagcaatacgttccttcatagcctaactgttgcacttaatttgacaattcaggatcaaataagttataataattttattgatgtgttcaactacatttttatatttttgcactgaaatcttaattcagtgcttttttcataaggattagactaaataagatgataatacgccagcgaaaaaattatttaacttctcaatttttatctaagattagtgccgatgggactttaaatattgaaaatttaattgtcctgacttgtgcaatttttattgcaagtattggactaaatgttaattcaacagctactattattggcgcaatgttgatttctcctctgatgggaccactactagcaattggcacaggtcttgctttatatgatgttcacttactgcgtaaaggaacaatttcattattagcagaaattattatcagtttagctgcatctacaatttattttcatttttctcctttgacttatgctagtcaagagattattgcacgaacttcaccaacaatctgggatgcgatgattgcgttttttggaggggtcgctggaataatcggagctcgcaaaaaagaagcaaataatattgtacctggtgtagcgattgcaacagccttaatgccaccggcttgtacgatagggtattcaattgcggcaggtaatcttaaatattttttaggatcaagctatttatttttgattaactgtgttttcataattttgactgcattcatgggtgtaaaaattatgaagtggttaagttattctactaagcaatctaagttgtttttcttgcacaagccgacctttaaagagtttgtgataattttagtagtaattattttaattattcctagtatcttgtcagctaatcagatggtgaataaaactctagtagatcaaaatgttcaaaatcttgttgttaatgaattaggcaatgttaatttaattaaggaaaatgttgatacgcaaggaaaaataattaatcttacagtttcaggcgataaaattaacgctaagaaaattcaagcggctaaagcaaacttaacaaaatatgacctgaaaggctattcactgaatattgtacaagtagctcaggttaatcccaatgcagaaaatcaattagatcgacaagtaaataatattattaatcagcgtcagcatgaacaagaacaagctgatgaaaaacgtcaacaagaacaagaaaaacgtaatcaaaaaattcgcaaactgtcatctgcaatatcttctgttactgcagttagtgataataaaaataagcaaattactttgatagagttaaaaaagccgctatctaagaagagaaaaaacgccttagtaagacaaataaaagataaatatccaaatattaatttagtggaatttgttcaagaaaatattaaaaattagaagaaactgtcaaattttttgtgtaaatagatttttctcgtagattgattttttaatcttttatttaatcaaagtagaattctaaggtatcctgaacctgaccaaagcctttgtggattcgattgaaatagcgttcgttgtagctcattgcttgaatgccaataaaagtatcaagcgactgttcatttgaaaactctgctttaggtttagctttacgcttgataacgttgttaaaggattcgatcatattggtggagtaaattgaaaccctgatctgcttaggatagctgtaaaagaccagcagatcaggttcaatctctttgagatttctgatgacatggttgtacgctctgttccacttgtcatagaaggcgtgcaagactttgatcgcagcttctttatttggctgttgatggatttgcttgaattcattcatgatattttcgcgatcatctacgcgtactttagcgcagatattgcgcatgacatgtaccagacagcgttgaaaatgagctttgggatatgtcttttccagtaccgtcttcatgcccacaacgccatctgaaagaaagagctcaacctgttctagaccgcgagacttcatgtcttgaagcatttccgtccaattctcgacgttttcgctgggagcaatgcggttaatcgatgacttccttgtggccattaggcttgatgccaatggcaatataaactgcttcacgatcaaaggttatgcgacgcaaagtaatgtaagttgcgtccaaataaatacagaagaacttatcgctaagcttgcgttgatgataggcttcaacttttggaatcatctgcttggagatgttagatacctgagctgggctgtagtgactgccgtacatcttttcaattaaatcggctatttctctggtggttacgcctttggaatatagcttgataatcatgctttccaagacatcggagtgctgcctgtagtcaggcagcgtgtgctgatgaaacatgccgttgcggtccctaggcacctgaatttcaatctcgccaaattgcgtatcaactttacggaaataagcaccattgcgtgaattgcctgtattccagccagctctggcataaggatcatagcctaaaaacgcagtcagttcagcttccaataagtcattaactgcttgctggagttctttgcgcaataaatcgtttattttgtcttgattgaatagagcttgtgccatatttttggtaaaatcattcatgaaggagttcttctttccgtatgtgttttttgttcaaaccaatcatacgagaaaggaactcctttttctaatgtttaaagaaataaatttaaggaatcattcatccttacacaaactattttacggtctcattatatctgtatattaatgcacaaatgctgttatatcaacgattagatacttcgctttataataaacagtgttattataaagatgccgagagggatagaggcaataaagaattagaatcgaaaggtgatatatatgttagatgttttaaataacaaagtagaattaagcaacgtacattttgcagaacacaaattagcaattgaagatgctaaaacaatgttagaaaacgaaggttggattgctactaagtaaaaagtgttgataattatgaaattaaaaacagaaaatgagacgcacgataaagtacctcataactgctataaattagctagtagttatgagtcgttttttattttttgcttgttatctattgatttgtagctaattctatatgacaatgatatctaaattattgaactataataaaaatccgttattttaatttggtctaagttgctatatattcaaaaaaatcgttaaatttttattatttatttggcggaatatgatatgaagaaacgtttcaaattagctgctatttttgtggctgcaatgttcgcagccgcacccgttgttggtatggcagaaacatcaactactgtttcagctgatgctgacatcatgcaacaatacacttttaatgactcagttttggactttactcctactttaaaggtttatattgctaagggtcacaaatttaccaccagtaaagaaactgcttacaaggcaaaataattaggattgattccgaaaatatagagctgttagatttaccgtggtctagcagcttttttgatgcaaaaaaataccactcaccgttaaatttagaccattcacctgaatttaataatttaacgaaaataagcaggtatactaataatcaatcaaggagggatgcaattgaaagttaaattgaatatcgatccaagtttaccagaagaaaaagctgaattttggttaaagaaaatgactgctagatttgaacggattactaaagagttgaattcggagcaggattttctttggtgctatctagatggggatgcctatgaaattaatttttctcaaatctatgcaattcaaatagaaaatgaaaaaacaatgatttgtactcaaaatcaaaaatatgtttataggggcagattgtatcaagtacaaagtgttctacctaacgattttataatgatttctagaggtgctattgttaattatcattttattgatcatctagaaattataaatacaggcaatattgatgcgcttttggagaatggactaagagtacaagtttctcgtagaagaataaaggatttaaaagagaggctaggattatgaaaaatattaaagatcttttatataacggtctgattagtggactgattggtattggtatcggtacgatctggatggctatggacttcttgttttcactaaatggtcaaaatcctgcaacagcgaagatatatttgaaaacctttcttttttggacgattatttcttttctcattggtattttcttttatctagctagctggatttttaatagtgaaaaatggtcattgaaaaaacaaatttttattaatttcttcgtctgttttgttgcctggttcttgttaaacctcctaattgataattttagtatttcactaaagatggttattagagtaacagttgattttattattatgtacgctattgcatacggtggatattttttacatttatggaacactgttagacgaataaatgcaaagttaaaggaaaaatagaataccataattaaaaaatgaaagaggtacccttgcatgactttattatctgtaaataatatttcaaaaacatatcaaaaagcacataaaaaggcggtatctgatgtttcatttaatgttgatagtggtgatattgtggccttcttaggtcctaatggtgcaggaaaaactacaacattaaaaatgattcttaatttagttagtcctgataaaggaacggttgtattcgacggaaaagatgtaactcacaacaatctctttttattgaaaaacactggcgttttattagaaggatctagaaatatgtattgggccttatcaccaatggaaaattttgtttattggggtggccaacgtggtttaagcaagaaagaggcagaaaaaagaggagaaactttcctcaaacagtttggtctgttggataagaaatacacctctattaccagattgagtagaggtatgcagcaagttgtgggaatttgctgtgctatgattgccgaaccaaagcttttaattttagatgagccaactttaggtttggatcttaatgctactcaaataatgattaagagtctgaatatgttatccgccaatggagtagggattctagttactacacatcaaatggaatttgctcaagagatagctaataaaattttattaatcaatcatggtaaacttgtcttttctaatagtataaaagatagtttgaagaagctgaataaacaagaaatttttgaagtgcatttcacccaagaacttaccgcctcagaaaaagaggatatacttgcaagctgtgaacttacaaagaagactgacggagtttatcgtttgggtgttaaaccgcaagcatctctttcacaagtacttaaattattgagtgaattaccaataagtagtatacaaactgtgactagaggattagatgaaatttttaagtactacacggagaaggaaaaatgataagttttaaagctgaattttggcgtcaattctatttatataagagatacctcttcaattatatttcagaatttttcttattaattttaatgtttatggctatttttgggggcggtagccttgtaggaggtggcgttttaggaaaatcattgaatgccctagtagttggctatgttttgtggagtttaattgaaaacactattagccaaatgggctaagtgtataattttttacggtaagttgaataaataattaaaaaagcccaagtcctttgaatttggacttgagctcaaacaaaaagaccagtagtctgatgttaagaacaaaaaacacattagaagctggtcttttatgaattcaattgtaactgaaatcgcaaatattataaagtctgaagataattatattaagcgtgaaagaaaaataatctgtttcttcttaaacctgattaaggaaatcatggccttggctttagctaaagttgatgatgaaatgattaccaaggttaaagcacagggctatcagattgataagaagaatgagcgctcaatcaatatggcttttggcgaagttaggtatgtcagaagaagatatgtctgcccaggcaaacaagcaaggtatcccttggatgaattaatgggctttgacaaatacaagcgctacagtattttagcagtcaaaaacatcttagaagtaagcagcgttgccacttatcgcaatactgctctagcagtcaattgcctgtctggctttaatattagccatatgcaggtgggcaatttggtaaaaatggccgggaaaaatattaaagcgggccaagaagcagattcaagatatgatgccgcaggcactaagaaaaaggtcccagttttgtatcttgaaggcgatggcgtggtgatcaaaggcactaaaagccggttggaatttcatcgctatcaggtctgtgaaggcattgtcaatataagcaagaaacgcagaaagcgaatcaatgccaaggaatttgtttctttaagccgacttgatgcgctgaacgaagccaaggagtacctggccaatacttatgatctttctgatactgtaattcttagcaacgccgatggcggtgctggatatgccaaaacagacttcgatgacattgtagggctatgcaagcgtcatgagcatttcttggatgtctttcacctaaataagaaaatcaaagaaaggctatattttgcgcctgacctgcaaggcaagctgatttctgctttggaatacaaatacagctatgacaaagttaaaactatcctaaccactgcagaaagccgactaattgatgaattgaataccgagctcaatcatgattatctggggcgcctaaggaattatattgatcgtcattgggacgatattaagccgtttaagaaacgaaaactgactgtgactaaagccattggctgctgcgagagcaaccaccgcaagtatacctaccgtgttaaggggcaaggcaagaaatggtcaaaatctggagcagaaggcatgcttaggatcttaagctgcatcaagaatcgagagctggaattttggcttagcagcgagtttgaagattcagaaataactgtattgactgaacaggaattaaaagcagcggcccgtgacagcttaaagaagcgtcatgaagttcatttaggcatccagcatggcgcattaaccgcacaggtagctggcaatagttatttaagcaagctaagcagaaatttaagtcatataacttaaacttcccacatcaaataagctggcaattctttgatattgcttagctttgggcttctatactatttttgctagttttctttaacaatttttgcatgtatttgggtaaacgattgataaagtcagccgtgaattctgctatttgtgcttcactggcatgaaagactttttcaacgctagccaccattgcttttgtgattagctgaagtgaatgactgaatgtaatatccgccagctcatcaatcatgcaatagaaaagctcacctaaggttcgctcatcttcgtcgtcccgcttggctactgacatgagcatatagcgggtaaagactatagccacatgagcagtcaaggcatcgtaggacagaccatgatattccgtgcttagttttaggtagcttttgcaggttttgaaaaaaacttcaatatcccagcgtttgccataattgcgaatgacttcatcttcgctaagcgacatgtcggtacaaataatagccagccactctttacgattggcacggtttctaacgcaaattatccgagcgtcaattttagcaccgtctttgtcttggcggccaaccttgactggaattgacaacagatagcgcgaacgcccgcgtcgctttttacagctacgataaatctgtttgatgtttttgcgttctccttcaaattcatatttgattttggagctaactttaaccatggcaattacatccagcttcctttgcttgagctggacgatttgatgtggatttgagaaccagctgtcaaacagcacgtacttggcttgatgacctgctttcatagcttggtcgattaaattaaccatcacgtctgtgcctttagtccgggcaagcatgcgtctttggccagcaatggtgcgctgatcacagactttgttttcgccaatcatattctgtagcttgtgagaggacagcaacaccgaattgattggcatgaaagaagctccatcagtccagcccagggtcatcatgcgaaaacctttcttgtaagtcattgatacatggtcaaaaactttggcgactaattctgttttcttgaagccggtcctagagaagtaggaatcatcgacaacaaagcaatcagcccgtttttctgaagtcaaagatcgcaagtgattattaatgatttgcgcagaaagcagtgtggtgaagtggagccaattgacgtggacgttgcgcataaatcggtaataagaatttttagaaaagctttctttaaaatgatccgttttcagctgcatatataagctgcggtcacgaaagacattgcttaaaacgtaaagaaacaagctgaacaggctaatgcctttttccttgcggaagccacattttctcaacagcttgatcacctgaaacttcttgatgaagctgatgattgagtttgaaaatagttgttcatttttttggtcaggagatggtaaaatagacattggcacaagcctttcatgcatagaattatcgtttggtcactttaattatagcaatgaaaaggtcatgtgccttttatatttgttaaaaaacgcagaatcacaataaaaggagcgattctgcgtgtgggaagtttaagtcatataaatatttaagaaattaaggttagactaatggtttaaaggctaccgcaaaaacattgacacttacccaaatgggatcaacagtgatgaataatgccaaaagtggtattttagaacaacaatatcttatgccaatttcttctagaagattatttttaaataaaagtattgcaaatattgttgtggcattcgtccaagcaattttaattctgatagcagtaatggcaatttctgatcactggattagttttccagtaataatgattgttccatttatattagctttactaactacagtgggattaggctatttaattgttagcttagttttacgttttaaaagaattggcagtaccttagtgatttttcaatatatttacttaggtatactactagttaattttgaaaactactccaatcttacaaaatgcttatcttgtttattgccaatttgtccaatggttagttggatgagattagcagttaacaatcgaccatacaatttagcgttttatttaagcgaatctatctttaataccgtattatggttgattattggattgctagtatttaatttagctgataaatatgtaaagaaaaatgggactttatctttttattgattttagttgctaataaattcattcatccctgaaaagtgattcttgcccacaaaaatttcaaggaataacttctacttatgcattgttctgtggtaggaacgctgtaaagtttgtgtctgcagcttgggtaaataataacgatcttcatgtttaaaaatagggcaaaaattgctctatttttagctcccattagaattttccgtggcataattgacgtataaatttgaaagggagatataaaaaatgaagaaaaaagttttatcatttattgccgcttttttagttgttttaggtttggctagcgttcatgcaaacacagcaaatgctgctagttagggtgctaccaaacttttcaccacacctaagaatacgcgtggtgtttggtaacacaaagaagctggtaaagttattagaactaaaattactgcacatactattaacggcctcaaggtttataaggtattaaagggtaaagaagcagataagtgggataaaaagttaactgctgccgatgaaaaggctaactacaaattagctgacaaagtttctagctcacaatttgaagcttatacctttaaattccacggtattacggatttcaacgcaaacggctggcttgctggtagcggcgacggctactactatgctcctatgaagaagaccgttaagggtaagaaagttaatgctttgcgtgtcggcggcggtgctggcaactactttatcagctacgcttacaaggataagaaattagcgtaaattgcaataataaattgaacacttaagctgcttgatagattttgtctaattctctttcaaagatttcatctggtgtgtgatatgccaatagttttcttggcaatgaattacaccaggtttcaatatcaatgatttcttgaagagaatagttattgatgtagtcacctttaggaatgaatctgcgaataaggccattgtgtctttcaacagtgcctttatcacaagaagtatacggatgagcgtaatagactaaagtgttagatactttctctaagttggatagatccgcaaactctgagccattgtcagttgtaatcgttttaaaaatttcattccagtgtttctatattgactgtgcaaggattgaaaagctgacattacactgttagccgttttatccggaatacgtatgatcaagaactctcgactcattcgttcagacaaagttagcagcacttgatcgtctctagtcttatgtcctaagactaggtcacattcccagtggccaaactcttttcggtcttaaatcactttagggcgctcttcaatgcttcgacctagtttctttttgtttttacggacacgatgaattttaatgttacgctttaatttttcgggtaaatcagagtttctgatagccaacaagccttggtctacatagttatacaacgttctagtacagactgtttattcgctgctaaattttcctatagccagacagcgattggcgcatacatcaagcgaccaattattttcaaagaagtgcttaatgacatacttaataaagtcattcttctttaagaaatctgacttgcgaccgcagcggtgacgatccaagtggtaaacttcattaccatgttttgctttatatcgcttttgcttgccattataaagcaaaactgtgccacgcttaacttcataactgatcgtagaaggagaacagccaatttcacgggcaatagctctaagagagaagccatccttgatacgagtttaaataataactcgctcttctagtgataaatactttcccttttcgtgcttaggcatgatagaatgtaaagagtccatttgtgacctcgtttctgaatgttttgtggtaattacattttatcaaacaggtccaaatggactttttatttttctaaagtgttcaatttgattttacaatcggcgaaatagaaaatatgttaattcataagaaaattatttttcaaataaaggcactttcttttgtgatttaacttcaaaaagacctttatcagagatttttagactaggagaaacaagtaaagacaaagtagagaaagacataatttcgtttgtatttttatagcccaattctacgagatttttacgtatattaccaatttgttctcctaaaatcttcattggttgattgcttacaactccaccaattggaagaggagcattggctgcaatcttttcacctctggcgactatataaccaccttgctgattaattaattgatgttgaatgtcaatcatgccatctatatttgttcccattaccatcaaattatggtgatcgtgagcccaggttgcccctacagcaccatcaccaataatgccacgatcaactaggcctaagctaaatttaccatcatttaaaccatatctttcttggacaataattaaagctaaatttgcactttgccaatcaacgatatgattatgtacagctagccttttttgaatatgatttgtaaaagtaccgacaggatttatttgaatgacatttgctgtaactgagccattatcaacaagatttgttttaagtaataggtcttgtttagttaatttaggagctttcacactagtagttagactattaggtgaaaaatcatcttgagaagtatttttgatagtctcttttgcggatattccatttttatagacatcagctattgagagttcttctaaattatccagaatggagaaatcagcaactcttcctggtgcaattgcaccacgatcccataatcccatatgtcttgcaggaatataggtagaaatataaatggcgtcttctggcttcatccccatattgattgcttttttaactaataaatttaagtgaccttttaacaaagtatcaggcattgaatcatcagtaactaaggctacatgttcaaaatatttattatcaataatagtattgatgacatctggatgcatggattttaattgaacttcaacaaacatcccgtttcttatcttttcattgactaaatctctagtttgttgagtatgatcagtagtaacaccggcatataaaattttagctaaatcttcaccatgataagcaggggtatggccttcaattggcatagtaggtttagttttatgacaagtattaattatgtccttaattagagtgtccttgtcagaagtcatatctttaaagttcatgacttcacctaagcaaataaagcgtggatctttaagtaattcttttacttcaggcacaccaattttaccgccagttgtttccatttgaggattggttgaaggaacagaagaagggatgccgaagaaaatatcaattggcgaatcttcattaatgaaatcttttaatccattaataccggcgacattagtaacctcatgatcatcagcaataatagtagtcgtgccatattttagaattgtttcacccattattttaggtgtagtcattgagctatcaatatgcatatgggcatctacaaaaccagggattaaatatttaccttgtagatcgatgactttttttgcttttaaattaggtaattctttattaatccaatagaatttgccatttttaatacttacttgaacatcttgaaattttcgtaaatatacattaaaaacatgagcatttttgataattaagtctacctcagtcatttaaaatcctccataaaagataaggagctgaatctacaattcagctccttatagggaataaacatcaattatttattcataatcttattccatcttgaaatccagttagacatatgtgaatttacaaagaagaaattaatagtttttgctcttttagcaactgagccataagttttgtttgctgcttctgcaggtgttaatttaacttgagtgtttacaggagcgttgttcaaagatttaagacctgctactttcttttgaattttttcgcttaatctaaagttgatgtatttgtatgcagctgctgaatttttactattctttaaaatagagacattatcgtagttagcatatgtaccagacttaggaacgatgtattttaagtttggattagttgcttgaagcataccaacagcataatcaccaactacagcagcttcaatttcaccagatttaaacatgttacttaaatctgaactttgggtgtaagttttgacaacattaggttttaattctttcattgccttaaatgctgcatttccgttgtctttagttacactagtaccagcatagtcaccagcaatatataacattgcggggccaaaagtagttgtcatatcaggtacagcaatcttatttttaagtttagatgaccataagtccttccaagaattaatattaactttctttggattatagataatacccaaactgtttacggtataaggaactgtattagtttctttagctagtttttgttctgattttgataaatatttgaaattggaaatcttagagaagtctaacttcttaaataacttctttttatcgccagtaacagcattgttttgagcaagttcaattacatcaacacctgtattagggttatgttcaatttgagtaagtcttgttgcactatcaccaaattgagtttttactttaactgatgattgtttagcaaaaggatttaaaacatcgttccgcatttgtttggtagataaaccaaaggttgaaacagttaaatttcctccgttagaagatgattgtgatgaacatgcagttgtaccaaatgcaactgaaccaactaataaaaaacttgcagctaataaaccaacttttttaaaattcatttttattcctttctttacaattggttatctagacaacggatgaagatgcttggagggcaaataaagctgaactttatctcctgagctacgcatcgatttcctagactcttcaacagtgaagtctccgagactagtacttaccttatatttaaagctctgacctaaatactcaagactagtgattgttccatcaatcaaattattagacggattttcttctgaattaatcaaaatattttcgggtctaatagttaataccttagcttgaatattattttcatcagttaagaaaacaagatctttacttttaatttggcgatcattaataatttcatcaacattgatgaaattatcataaccgatgaatctagcaacatattctgaactagggtggtgaaagatgttttcaggagtatcatattgatcaattttgccatctttcatgattaatactttatcggaaatagcgaagcattctctttgatcatgagtaacaaaaagaactgtcatttttagcttttgctgcaattctctaatttcgctacgcattttaattcttaattttgcgtctaaattactcaagggttcatccattagtaataattgtggattgactaccaatgcacgtgctaaagaaactctttgttgttgaccaccagataattctttaggatagcgagaagctaatttagacaagccggttatttttaaaatttgatcgactcttttttgaatgtcacttttagacatctttttcatttttaatccgaaagctacattattaaagacggtcatatgtgggaataaagcgtaactttggaaaaccattccaaagtttcttttgtaaactggtacttttccaacatcttcaccatcaactaaaacttgtccgtctgttgctggaattaaacctgctatgattcttaaagtggttgttttaccgcaacctgagggtcctagaatagatactaaatcaccgttttttacggaaaacgaaatatcttttaatactttggttttaccgttatatgattttgctaaatcttttacttctaaaattgccaatttaattgttcctatcagtaagtttatttagaccaactagtttttcagttaaaagcataattaatgctgtaaaaatcattagaactacagaaatagcagaaacagttggatcatagttgttttgtaaatagttcaaaattgctggtggcagcattgtaattgatggtccattcatgaacaatgaaattggaatattattaaatgaattaataaaacacatcataaaggctgctacaatacttgctttaatgttaggtaaaacgattaagaagaatcctttctgaggtgaacatccacaaacccaagctgcttcttcaatatttttatccattagtaacatacttgctgtaactagtcttattacataaggtaggcataataaaaagtgaccaataattagactaggcataacaggtagtctaagagtaacgacagcagcttgatataaggcaaagccaattacaatttctggaattagagtagggcttaagaagaaagagtgaaaccaagacttatgaacgatgttgaatcttgttaaagcataaactgcagggataccaattattaatgccgaaagactagcaataatggcaacgaacaaacttgattcaaatccactgataaaatctggttgctgaaaaatattggcataccaggataaagtaaaacctttaattggtagagaaattgaatcctgattattaaatgaagtaataattactaaaagtagaggaaacatcaataatatcaggataataatagaaataattgctaaagttttatttttacgattaagcattaatattaggtctcctatccaaagaaactgtcaaatcttttgtgtaaatagatctttctcgtaaattgattttttaattatttatttaatcaaagtaggattctaaggtgtcctgaacctgaccaaagcctttatgaattcgattgaaataacggtcattgtagctcattgcctgaatgccaataaaagcatcaagcgactgttcagttggaaactctgccttaggcttagctttgcgcttgatcacattgttaaatgattcaatcatgttagtcgaataaattgaagctctgatctgcttgggatagttataaaagaccagcagatctggttctatgtctttcaagcttctgataacatggctgtaaaccttgccccatttggtatagaagtcatgcaggacagctgtggcttcttctttgtttgtctgttgatgcacctgtttgaattcgttcatgatcttttcacgatcgtcgacgcgtactttagcgcagatattgcgcatgacatgaaccaaacagcgttgaaaatgagctttaggataagtcctggccaaggctgttttcatgccaacaacaccatcagaaagaaaaagctcaacttgctttaagcctcgggatttcatgttttgaagcatatctgtccagacttcaatgttctcgctaggtgcaatgcagtagtcaatgacctccttgtgcccattaggcttgatgccaatggcaatatagactgcttcacgctcaaatgtttctcggcgcaaaggaaggtatgtcgcatccaaatagacgcagaaaaacttgtcgcttagcttgcgtttgtggtaagcctcaacctttggaatcatctgcttggaaatatttgatacctgagctggactgtaatggctgccatacatcttttcaattagatcggctatttccctggtggtcacgcccttggagtaaagcttgataatcatgctttccaagatatccgagtgctgcttgtagtcaggcagcgtgtgctgatgaaattgaccgttgcgatcccgaggcacttgcacttcaattgggccaaattgcgtatcaactttgcggaaataagcaccatttctagagttgccagtattccagccatttctggcatagggatcatagcccagaaaggcggtcaattcagcttctaacaagttattaacagcctgttgtagctctttgcgcaataaatcatttattttgtctggattgaatagagcttgagcaaaatctttggtaaaatcattcatgaaggagttcttctttctgtatgtgtttttttgttcaaaccaatcatacgagaaaggaactcctttttctaatgtttaaagaaataaatttaaggaatcattcatccttacacaaactattttacagtctctatccaaagcgcgacttgcttttctcattaatatcattgataaagcagagataataatcagaactattgcaataacacttgcatttttccagttacctaatgtcatggcttgttggtaaatcaaggtagacattactaaatttttattacctcccaaaatttgtggggtagtatatgctgtcatcgcacctgcaaagaccaaaatgcatcctgttaaaatccctgagactaattgtggtattacaatttttatcaaattaacccatggattggcgcctaatacagcagcagcttcttctgcttcaatgtttagctcagaaatactaccaactaatgaaataatcataatcgggagaaataaataagctgaaccgatgataattgccgtatcagtataaagaatgtttaatggagaattaattaaatgaatagacatcagaaatttatttagaataccgttacgacctaaaataatgatccatgcaaagtttctgacaactgcattcgttaacattggaaaaagaatgataattgttaaaattgatcttactttgctcttttgacgagcaatccaaagtgaaattggaattccaagaattaaaacaatgatcatagtgagtaaagcaattttaaatgttctaccaattacatgaagattgtacgtgttttttagaaattcagtgtataggtgcaaaaatcctttagaatcttgaaatgttggtatagcaatctgaattaatggaaagaatgcaaaaatcaagacactaataaatgccggaaatagcagccaaaaactggattttattttcatattgttcgtattcctccttatcttgtcttagaataatttaaatgtaaaaataagtcaatacaaaatatgaattaaaataataacatttgtgttaattgtatgcgtattgtattatttatgaatataaatagatttatttataaatttatcttcttgaaaatacgaacattacccaaaaggaagtggagttcttaatgaaaaagccagttattattagtacagatccaggaatagatgacgcagttgcattagcaatatgtcttttttcgcctgcaattgaagttaaaagtattattgcaactaatggcaatgttaatgcgcaacaagctttaataaatatattgaaattggagaaatttttcggtaaaagtattcctgtagtaaaaggggtagagcgttcattagtcaaacaatctattcgagctaaagaaatacatggtaaatcaggaatggacggatatgattttccaaatcctagttttgaattggtggatcatggcatatcaccggttgccatacataaaatagttgcagcttcttctgaaaaagtaactcttattggaattgcaccacttactgattacgctctatatgttcgtttatacccagatgatataaaaaatattaaggaactaattattatgggcggagcaatgggtagaggtaattatggtatctattctgaattcaatattgcatctgatcctgaagctgcaaaaatcatttttgaaagtggattaaaaattagagtagcgcctttagaattaggtgcacaagctaaaattatgcctgaagtaagtaatcaaatacgacagttaggaaaagctggtgatatgttttacgacttatttaagaaatttcgaggtggcagttttcaaactggccttaaaatttatgatgcacttgcagcaggcgtacttttaaatccgcaaatgtttaaatttaaaaatacacatgtagaaattgatgttcaaaccggttatacatatggtgcttcattgatggattttaaaaataagctagatcttccaaataatgctgaaatagcagtgtctgtagatccagaaattttttctaaatggtttgtagaagctttatcaaaaacaagataaaaaagtcaattaattgtcaacaattaattgacggataatggttaagcgagtatactactactagttgagaacaagaagaagcacccgcttctcgcctaagttaagtaaacctctaggctgattgataatttctgttgattaaaggcgggtatgattcttataacccgcctttttcttgtcctcaaattaacacggaggtgaacagttataccaagaagtttaatcttaaacgacagaattcgcgctcgcgaagttcgtttaattgatgaagatggtcagcaagttggtgtgatgagtaaaagtgatgccttacgtcgtgcaagcgatgcaggtcttgacttagctctgatttctccaaatgctaagccacctgtagcacgtatcatggattacgggaagtaccgctttgaacaacaaaagaagcttaaggaagcccgtaagaattccaagacagtcagtgtcaaagaaattcgtttgagtccaactattgaaggtaacgacttcgaaactaaacttaagcacgttcgtaagttcatttctaaagaaggagctaaggttcgcgtctcaattcgttttagaggtcgtgccatcactcacaaggaattaggtcaacaagtacttgaaaaaatggccgaagtaacctcagacattgctaatgtaattagtaagcctaagatggaaggtcgttcaatgttcttgatgcttgcacctaagagtgataaggacaaaaagaaaaagtagttaattggaggaaatagaaatatgccaaagatgaaaacacaccgcgcttctgctaagcgttttaagagaactgcaaatggtggtttaaagcgtcaccacgcatttactggtcaccgtttccacggtaagacaaagaagcaacgtcgtcacttgagaaaagctgctatggtttcaaagagtgatatgaagcgtatcaagcaaatggttgctcaaatgcactaatacttgttcttaattaagacagactatagtaggaggaattttaaatgccaagagttaaaggtggaacagtaacacgtcaacgtcgtaagaagatcatgaagcttgccaagggttaccgtggcgcaaagcacatgcaatttaaggctgcaagcactcaattattcgtttcatacaagtacgcattccgcgaccgtagaagacgtaagagtgaattcagaaagttatggattgctcgtattaacgcagctgcaagacaaaacgacatctcatattctaagttaatgcacggcttgaagttggctggtgttgacatgaaccgtaagatgttagctgatattgcttacaacgactcaaagacttttgcacaattagcagaaactgctaagaaagctttgaactaataacaaaagaaataagctagggaaattttcctagcttatttttttatctatttttgaattaatgctcgtaatctaattttttcatctggcgtagtaaaggccgcgtcaaccgcgttgagataaagagtggtttcttcttcaggagtcaaggcggtcttttcttcaagcagttggtattcatgcggtaaattggtattggaaacgatcatatcatcagaatttagcgtgactttcattcccatgtgcaataatttttttattgggtaagaatcaatctgatcaaaagctttggtgttcatatttgaagtggcgcaacattccaatatgatttggtgatcaatcagatattgggtaagtgctggatcttcagtgcagcgaatgccatggccgatccgtttcgcgccaatttttaatgcttgacggattgaatcaggtcccgcagcctcaccagcatggatggtataaggaaggtgtaattcttgggcacgattgaaaaaatgctggtagttaatgttagggatcgggccttccgcaccagctaggtcaaggccaacaacgccatgacctaaaaattctttcgctagctcaaccgtttccatgttttctttttcattgtgggcgaagcgcatcaaacagagaattaaaccagcgtgtaattcaggctgatctttgtctgctttttgtttttgataaaacttcgtaataccgctgactgctgcagcgattacttgtctttgcgttaaaccatttttagtatgtaattgcggtgcaaagcggatctcggcgtagactagaccttgttgttttaattcgcaaagaagatcaaacacaatcatctccagatcatgctttgtcttcattaactggttaggtaagtcaaacttttccaaaaattgttccaagctagcgcaagaattatcaactgacaattcttgccgcaatttttgatcagttaactgtggcatgtgatgttcctgcattaacttcttaacagtagcaactgggacagaaccgtcgaggtgaaggtgtaaatcgatgaattttctcatggtgatcctttctgttgattgatgattttgcttaaattgtttagtattgtaacactttttcatcagaaaaaaacaaaaatttctaaagcaaacccatttttgatatgatataaggtgataaaaaatggaggaaattaacagttaaaagatagacaagatacaaagatctgttcagaaatataaaacatagaagcaggtcaaaaactaaaaatttaatattttgttcgcttgtatttatttcactctttgctaaatttatgtttgtattggaggtgaaacaaatgatcaaggctcaagtagtcgaattaaaacctaacaagaccatgcaacaagagctggataagctttgtgattatcgcagatattgctggaatcaagctttagccacttggcaagatatgtatgaagcacgaaccttagataaggataataatcccagtccaaatgagcgcagaatacgtgatgagctagtcgataataaggcagactggcagtttgctctgtctgctagatgcttgcaattagcagtcaaagatttggctaatgcttggaagaatttctttgataaggcacagcctgattttggaaaaccacatttcaaatcaaagaaggccccgcgacaaggctttaagactgaccgggctaaagtggttaatggtaagctacgcttagacaagcccagaggcattaaaacctggttcgatattccaacatatgaagctttaaaaatgaagcaaattaaagttgctagtgtctttagagaaagaggacattattatgccgctctttcttatgaagaagaaactttggtaaagcctagaacaggtagaaagacagctgttgatgttaatgtgggacatttcaactacactgggggcaaaatcaatgttttgccatcaagattgcaaaaactatacaagcgcattaagcattatcagagaatgctggctaagaaaagacgggctaatggcaagttagctggcccaagcaataattacgtgcaagtgagaaccaaactgcaacgtgattatcgtaaagtagccaacattcaaaacgatcttttgcaaaaattcactacaaaattggttaataattatgatcaaatagtgattgaagacttagccgttaaacaaatgatgatgacgcacgtcgcttcaaaaggcatgcagagatcattattcagtaagtttagacagatattgacttataaatgtgagtggtatggcaaagaattaatcttggctgataaaacatatccatcaaccccaagatgtgctaattgtggttatgttaaaaaaggtgatgaaaaaatcactttgcaaggcaaccaaaaacatcacactaagcacaatgagtatgtttgttatgaatgcggttatactaatgatcgtgatgataatgcagtgttaaatcttttagctttagcaaaataatgaaaacggggctggctaagcccttaagctgcaagagttagtcaatgcgattactcctagattggaatattggaatactaatgatgacagcagtaaataaagcgaagaaaggaaggactatatttctttctgatatgtaaaaaatatacattcttctacatatttctatgttttatatagcagtgttgatatgctttttagaccaaaatatacaattgatacgatttacaatctggacccccagaagttgaatgaaatggacattaaggcggttttttcagacctagataatacattgctcgcctggaataaatttgaaactgccaaagaaatggataattttaatcaaaagttagccaaggcgggaatcactctcgtggtcatttctaacaataatgctcaaagagtgggcaaggtacttgatccttaccatatcgaatttgtcgctaagtcacgtaagccattgccatttgcgatcaccaagaagcgcgaagcaatgcatttgcaaaaagatcaggttatgatggttggcgaccaactaatcactgacatgcaagcagggaatttggccggcgtgaagactgttctagttaagccattagttgaaactgataagtggaatacgagaatcaatcgtttctttgaaaaaattatctttttcttcctgggtttatcacatcgagtaacatttaagaaggagctatcaaatggatgaggatattatttgtatcggctgcggtgccaagctgcaatccgatgatcctgaaaaagcaggttatctgccaaaaagtgcactagataaggcaaagcaagaagaaaatgcggatgtttattgtcaacgttgcttcagattgcgccattataacgaaatcatgccagttgatttgaacaacgatgattttttagctttgcttaactctttaggacaaaagaaagctttaattgttaatgtagttgacttatttgatttttcaaattctttgctatcatcattgaagcgttttgttggaaataatgattttattttagttggtaataaatttgatctatttcctaaaaactctaagcaaagtaagattaaggattggatgagacaagaagctaaccgaatggggctttatcctaaggaaatcttcttggtttcagctaaaaagaagttgaacttggaagatttgatcgcttatattaataagcaatcgcaagacaaagatgtctattttgtagggacaactaatgttggtaagtcaactttaatcaatgccattattgacatgatgggtgatattcaagacctgatcaccgcttcacgctttcctggaactactttagacaaaattgaaattcctctagaaaatggtcactttttgattgatacgcccgggatcatgaccgagaatcaattggctacgcacttaaatgctaaggatttggagctggtctcacctaagaagcctttaaagccagctacttaccaattattgcctggtaatactttattcttagctggtttgggacggattgattatctcaagggcgaatcgactagctttactgtttacgttgctcgtggaatgtatattcaccgtactaagacagctaatgcggatgacttttataaaaagcataaaggtgaattgttatccccaccagctgcagatgatgaaatggcaccactaaagggtcaagaatttagaacggaatataagagtgaccttttatttggtggaattggttttgtgactgtacccaagggatgcgttgttaagacttacacaccagatgggattggtttaggtattcgtcgtgcattgatttagaggtttgcatatggttaatccaaaatgtattgaaaaaatgccaactgctaaagttgaagcagaattggaacaagaacaaggtaaaggtcgtcagattgggattatgggtggtacctttaatccggtgcatattgcgcacttggtagcggcagagcaagcaatgactaagttgaagctggatgaggtctggtttattccggataatattccaccgcataaaaatgctccgctgacttctgctaaagatcgggcaacgatgcttgatttagctacgcgcgataatcctaactttagggtaaaactattggaattgttccgaggcggcgtttcttatactgtggatactatgcgttatctcaaggaaaaagcacctcagaatgactattatttgattatgggcagtgatcaggttaacagtttccatacttggaaggaagctccgaccctggctaaactagtaacattggtcggaattcgtcgtccaggttatccacaagatccgcaatatcccatgatttgggttgacgcaccagatattcgcctaagttcgactgctattcgtcgcagtgtcgcaactggcacttcaattcgttacttggtaccagaagccgtcagagaatatattgaagaaaaggggctttaccttgacgaaactaatttttaaaaatacttattcaccattctctagtgaacaaattgttgctaaagaaaaggcaaacatgaagaaaaaacgttttgaacattgtgttcgtgttagtgaaactgcacgtaagttggctaagttaaatggatatgatgaagaaaaagcagccttagctggctttgttcatgattatgccaagcaggtaccggtagaagagtatcgtaaggtaattaaggaacaggattttgatccagatttgcttaattggaatcgggccatctggcatggcattgtggggattttctttattgaacgtgatttaaaaattagggatcctgagattttaactgccgtacgtcgtcatacgactggtgatactaagatgactacattagataaaattatctttgtagctgattttattgaacccggacgagattttccaggagttgaagaagcgcgcaaagttgcttatgctagtcttgatgaaggggtaggctatgaattgcagcacaccttagagtttttaattgaaaataaaaataaagtatatcctcgtactttagaagcatacaatgtatggggaattaagtaataaaaaggagaaaaatattgactagtcaagaaattttagattttactacccaagcaattagtgaccgtcatggtgaagatactgaagcttacgatatgcgtggaatcagtattttagctgattactatgtcattaccagtgcaggctctaatcgtcaattacatgcgatcgttaactcaattgttgatgcggctcacgaaaacaactacactgactaccgtattgaaggtaccagagattctaactggcttttgctcgatttaggtgatgttgtagtcaacgtctttactaaggaagcacgtgaattttataacttggaaaagctatgggctaacggtaagcaagttgaattgaaggaagattaagcaatgagtgttgttgggattattgcggaatttaatcctttccatagtggacatgagttcttgctaaatcaagcacgcttggttgctggtaatgatccaattgtggtgctcatgtctggtaactacgtgcaacgtggtgagatggcgattatgagcaagtgggagcgggctaaggtggctttgcaatctggtgccgatttggtatttgaaacaccattttcaacggcagtagaaccagctgatctttttgctctcggaaacattgaacaacttgctaaattaggcgtaactgatttagtctttggtgtagaagatgctaacctgaattttgcttatttgggtaaaagaattgcggaaattccccagaatcacatggattttagagattatagccaaacttattcaacacaatacaaccaaatggtagcgcatgaagtaggctatgaagttaatcagccaaatgctattttggggttagcgtattcagtagctaatcataatttaggttcaccattaaatctgcatccggtcaaccgaattggagcaggacatgatgaccttttacaaagagaaaaagttgtccaaagtgctagtgcgattcgaaatttattattgcatggtgaagatacaaaaaatttaaagtattggatgcctaaagcagaagcaatggtgttagctgagcagaaaatttatcctaattggaatttgctatatccatttttgaagtatcgaattgaatcatcttcagttgaagaattgcgtcatatttatcaaatgagcgaagggcttgaatataagatgaaacaagagattcatttagcccgcgattttacagaatttttgcggcatatcaagtccaagcgttatacttattcccgtttgcgccgtttgagcttatatactttgcttaatgtcactcaggatgatatattggctagctttaatcatgagtctttgatgctcttaggctttagtaaggtaggtcgcaaatatttaaagcaacagcgcaaggaatttcagacagaaatcgtctctaaagttgataaaagaagtgctaagaacggctctttagctttacaagttagggtagaccgtttatttgaacaaataatgggcgttgatcaaaactttggtcgacggccaatcgaggtgtaaaaatgttagaacttagtttttctaggattcaaaattccaaggaaccattaactcacattgaacgtgatttggaaatgcgtccagaattttttaagcgtagtaaagatctactaattgatgcgaaaaatgtaaaagtgagcggtgacttgttctatcaagaaccatttgtgactggcagttttcatgtggccgctgatctggttgtgccatcaagcagaagccttaagccggtaaactatcatgaagattttacttttactgaaaactaccttgatcgtaagccaaccaaggaagaattggaagaaaacgatactattgtacaagttgagaatgaccaaattgacttgcaaacagcggtagaagataatattttactccatattccaactactattttgactcctgaagaaaaagaaaagaatattttcccagagggtcaaggttgggaagttgtttctgaaacctcttttgaagaaggcaagaagaaccaagttaacccagcttttgctaaattgaaggtcttgcttgatgggcaagataatgataaggacaataaaaataagtaataaatgtaattgaaaaatatggtggacaatcaaagaaaatttttactttgattgttttttaatcttgtgttagaagcacttttaaagtatcctttaattataaaagcattttttaattaatttattagtattagaaaaccaaattgatctacgaggaaatgaattaacatggcaaaaattctaattattgaagatgaaaagaacttatctcgctttgtcgagcttgaattgcaacatgaaaattacgagactgttgttgagaataatggtcgtaagggattagaagatgcattgagtcaagactttgatgctatcttgcttgacttgatgttacctgatttaaatgggttggaaattgcacgtcgtgttcgtcaagttaagactacgccaattatcatgatgactgcacgtgattcagtgatcgaccgtgtttctggtttggatcatggcgctgacgattatattgttaagccttttgcaattgaagaacttttagctcgtcttcgcgcagtgttacgtcgcgttaaaatcgaaaaggacgcatccaaggttactgttgctaagcaaaagattgtaaaatttaaagatttgacaattgaaactgctaaccgaattgtgcaccgtggtgatggcaaggcaatcgatttaactaaacgcgaatacaacttattaatgaccttgattgaaaataagaacaacgtagttagtcgtgatcaattattaaacaagatctggggtccagaatctaatatcgaaactaacgtagttgaagtttatgtacgttatttacgtaataagattgacgctccaggtcaaccatcttacattaagacggttcgtggtaccggttatatggtaagagatgaagatgatgatcaagaataaagacgaggaaaaagaggccaagcactcatccctaattgtgcgatgggttagtatcgttgcattaacgattacggtctcttttgtcatattttcagttgttgcctatcaaattgttagtcatcaatcgatggaacagcaacaagagacatctaataatgtagttaccacgatggaccggacattaagttctattcaagatgagctagagatctcaaatgtaattcctgctctgtcaccgtctaccaggcgtattttgaggggcggtcctgctattagcaaaaaagatacagagaataaagcatttagtgatagcctgatttcatcgatttcgaatccagatattaatgtagcagtttacaacaaacatgatgaaattgtttttactaatggtaattctgcacctaagctaaaagaatttgccggcaaccaacttgaagaagtagtaaaccgaaaaaaaggcaaaatgcttttaacctaccagaaaatctattctgaggtaaatggcaaattaactggctatgtagtggtttctaatagtatgacttattacaatagcttgatgagtaatttgcttcattggatggtaattatttcactgattgcaataattatcttcattgcaatttcttatattttggttgttaatgtagttcggccaattaagacgatgtctaaggtggctaaggaagttaatgctgatcctaatagtgaggctagaattaaggaactacatcgagatgatgagttagaagaattagctacttcgattaatcaaatgctagaccggatgcaaggttacattgagcaacaaaagcaatttgttggtgatgtctcacatgaattaaggacaccagtggcagtaattgaagggcatttgaacctgcttgaaagatggggcaaggatgatccgcagattttggatgaatcaattaaggcttcgttgcaagaagctgatcggatgaaacatttaattcaggaaatgcttgatttaactcgagccgagcaaatcgatgttcaatatccgtatgaagtaagtgatgttaatgaaatcatccgcagagtggtcgctgatatggcaatggttcatcctgacttcaagattcagctggatgaggatgatttacctgatgatacagagattcaaatgtatcacggtcatttggaacagttgctagtaattttgatcgataatgggattaaatattcgactgatcgcaagcagattaatgtttcagctggtgtaactaagaagaatgttaatattattgtgcaagactttggtgaggggatttctgaagaagatcaaaagaaaatcttcaatcgcttctatcgtgtggataaggctagaacccgtgaaaaaggtggcaatggtttaggtctatcgattgcacaaaaattagttgctagttataacggaacaattagtgttgaatctgttgagggtcagggcagccagtttaaattgaagttccctcggttgactaagaaaaaagccgctaagttaagaaaattaaatgagaagaaacaaatgcctaagagcaatcttgaggcataaacaaaatcctattaaatcaaggtttgggtaccaagatttaataggactttttttctctagaggcttaggtattagaaaataagaaataaaatgcttcgaaaataattataatttttattaatttaagcgatataattagctaaaaatatttaaagttaagggatgtgacataatgaaagaacgcattttttcaaggaaattttggcagaaagtttttaactatcaattgattatctggtttctcttgatgattagttatactttttctcagcggaacaatcatttttattttataggggatttgttcaatctagcttttagtacggcgatcatgggattgaacttttacgtgcaatttaaaaaggattccagcaagactaatactcaaattgttcgctggctgaccatagtaatttttgctaaatttggcatatcactgggaatttcttgctaaaaaacctgccggctatcgagattctattagtattactgctatgggcggtttatattttcttgctagttccaattgcagttgtacatgttggaccgattaaaaattggtttttacgcttgctaactatttactttcttgatattcagtacggtgatgcacaaaatttagcaataaatccagatttttgctggcttcattcacttacttatcaaggtgtaatcgcagctattgctttattaacgatgacttgtttcttagttaaagcttggggctatcacttcaatccaaacttaaaatttattaaaagttcaagctttcagaagaagatcttgctggctttattgatcatggcaaccattgatttgttttacaatattcctaatttaactgcagccattgagcccggaattttggaagaaaccgaacgctatttattgatcgtaatttttttagctggttttaatagattcccaaagtatcgcatccctgttgcaatctatggttcagcaattttgttcggccttagtcatttaagtaattttggctggcatggagaaagttttactgcaacaattgcacaagttattggcgtaatggggagcgcctttatctgggcagaattgtatctctatacaggaaaactatggttgccgatgatctatcactttttaatggattatatttctgatttgcaatctggttggaattctgctggctggtcttggaatggcgaaatcactgattatatttatactgtattaattgttggcgttccattgctattctcaatttggatgcttttcggtaaaagaaggcaagtaatggaagataatgcagatttgattttggatctaaacggtaggcaaagcatgatttagcagtgacttatattaaagggactataatgtatatgcaagggtaaaataattaagagaggtcataaattatgaaacttaagagaattgtattaagtattgtggctggaactgcgcttttggttcctgcagctttagcgggtcaaaatcaattaacaccggtagttcgggcaagtactctgaagaataagattacaactgttaagagctataccaatccaactttgtataataagaatggtaaagagctaggtagccaagatcggataaattttaagaaaccgatcagtttttatgggcaacctattgttattcagggacccagggtcaatgcttttattaatcttaatgggatgccacaagctattgttaatggtgaaacctatgcagatttaggtgatggtggttatgtcaacatgaaatcggttggtagctataactggaataataatgagatcggaattattaaaaacacctatatttacaatagcaagggtaatcgtttatcaacttatcgcggtggcaaggcttatttaactaaaggtagcaagattaaatatgctggtaaaagttggactacttatcctgattcatattttaatttaggtgatgggacgtatttaaagtctaataacgttaataccatgaatggcaaaggcgttttgaagctgaatgctaacactgctatttataataagaatggcaagcgtattagctttaatggacaacaggtttttcctaaatactcaattataaattatgctggtaagcgtcgcactaagacacaaactgacgattactattacacaaacttaagtggtagtaaatcatatgcaattaagaattataagattaaaggtcaagactattattacattggcagaggtgcttatatcaaggcaatgaatgttggtcgcatcaatggcaatccggtatttcgtgatggcggtgcaactacgattgttccgcagacagatttgtacatctataattctaaattaaagaaaaccaaacaatctgttaagaaaggacaaaagattagagctttagatccagttgttcttggtagtggtgatattgcccaactattttacagaattaagggaacatctaactatgtttcctggggtgattatagtgagtatggttttgaagatgatgagcacgtgggctacttcaactttcgtgttagattaaatcctgttaaaactattgaaaatgccgctacacgggccgctgaagaatcagattaattgggagtgaagacgttatccatttggatagcgtttttattggattatgaaaaagaattaatctgaagtgtctaggaaaactctaaaaattgaaaactcctactaaatcttggcataataagccttgatatagtaggagttttgttttgagttaaagccaaaaatcgattaaaaatagctttttctcagatacaaacttaattttttctatagagatctttcttcaaacaaatgaccataggaacttaaaattctagctaaatccgtccaagtaagactgatagttttggtattatcattgggatggacgccaacataattattttcctccatggccgcttggtctacaatcaagggaatagtgttgctagaatcattgagtaagttaaagggtgaaaccgtaccagatttaaccttgagtttttcctcaagttcatcttctgaagcaaaagttagactaggagaaagtaattcactttgtgcttttttccagtcaacttttttattctcaggcaatatgagtaaataataattttttccgttacgcgatttaataaaaagagtcttacatttagtaaaatcttcatttttcaagtatttatctgcttctttagttgtataaactgctggatgagaaaaaacttggtaactaatatcgtgatcatctaaaagttgtaatatttcttgagtatgcatattttcctcctaataaaaaagtcaggattttactcctgactgataactatttacgcttttgcttacctttattacggttacgtaagtcttggtgtagttctttcttagcttcagttgtagccttgctttgaccgctattggagttaaacaaagcatccactttttctttagtaacaacagtttcaattggcttatcttttaattcatcggcaatatgcttcttaacactaggtgtaaggacaaaggtaacgattacttgttggacaatcattactaagttaccagcagcccagtaaagagctaaggcaccagagaaggataaactgaagaacaaagtcataattgggttaacaatcatcattgattgcatggtcttcttttgttcttctggaataccaattagtgagatataaccttgaataacggtaaagacagtcgcaataatggctaaaacaacagatttggaacttagagaaataccaaagaatttggattgtgccaattgaggtgaatagaataccgcttgataaattccccacataattggtaactgaataattaatggcaagcagcccattccaccagttaatgaaacttggtttttagagtaaagctctctttgccaagttgataaagtcatttgttggtcaggggtgatccccttatgtctcattgcattttgaatcaacttcatttgcggttgcagacgagccattttttcctgttgacgtacactcttgttttgctgtactaacatcaatggcatcaagattacacgtacaactaccgtaataatcacgattccccaaccagcaccattatcgccgccaatcatgtgcgcggtttgaatcatgatattttgtaaaggtcggcctaaccattggtaaacccaaccgtaaataccgctgtgcggtgcaacgtgtggatcagttgttgccccacaggcacttaatacaagagtagctactgctaataaagccagtactccagcgtatcttttaatttttttcatttaaataaatcaccacttaatttctatctaaaaatgtatgtctctaatataatacatgaaaatcatgcattttttctacacctggaaccgattcttgactaatattttgaatttgggcaaatccagatgcagtaggtagtttttcaataaagcggtcgattttatcattgtctgcttgtaaatagattgtaacggtaccatttgcattatttttaacagtgccaggaatacccatcttgttagctaatgccatggttgaccaacgaaagccaacgccttgaactaagcctgaacaaattaattttcttgtttccatttttatctcccttatttaaattaagttcaactttgattttagcatgatcaaaatagattatcagttataatagattttgaatacaaaaaggagaaaaatatgcaacaaattagttcagttaataatgcaacgattaagaaattagcgaagttaaagcaaaagaaataccgcgatgatgaaggcttatatttaattgaaggctttcacttatttgaagaagcacttaaagctggtaaaaaatatcagtatatcttaggtactgaagaagcacttgatcaagcagatagtgaatatgaagttaatttaagtgggaagaatgtcgtattaattaacaaagcgattgctcgccacttaagttcgactaagaattctcaagaaatttttatggtattaaaaattgatcaaccaaaagaatttccgtttaattatggcaagtgggtgctgcttgataacttggctgatcctggtaatgtggggacgattatcagaactgctgatgctgctggttttgatggggtagttctttcaccagagagcgctgacctgtataatcctaaaacgcaacgtgccatgcaaggaagtcaattccatatcgatttgattaagcgtgatctagctgatgtgatcaccgattttcaggatgcagctattccggtttatgcatcgctgcttgatcgttctgctaagcaattgcctgatttcgaaaaagtgccacaacttgccttaattattgggaacgaggcgcatggcataagcaaaacaattgcttctttagctgatgaaaagctttatattccaattaaaggacaagctgaatcgcttaatgccgctgttgcagcagggatcatgatctatcactttgcttagcacttgtaattagtaagtagatctactataataattttagtaatactaaaaagtattttatataatagtatttttactggaattatataatacggagggacttacctatgcaagaagttaaagagaaaaaggacgcagctccttgtaaaccagaagattatgaattatgtggtcattttgttagtgcgtttaagattattggcaaaaaatggaatggcttaatcatcagttctttgtgtgatacacaagatatgcgctttaaggacttggcacgaactgtcgaggcttgcagcgaccgtgtcttagttgaacgtttgaaggaacttgaaaaggacgatattgttaaaagaagcgtcgatcaaagtaccggtattatttcatatggtttgactgaaaaaggtgcggaacttaagcctgtttttgatcaagtacataattgggcagataaatgggcttaagctattgacattaagtaagcatagaagtatattacttattgtaagttgcttatttaaaataagattaggtgaaaggagtacgaaaatgaaatctttaagtatgatgaatgttaatactgactgttgttcttgtgtatctaacattatttttaatactcaagaactcagttttcgtatttccgaatagctttaatccagagatcaaaaagatttacgttagctgaaaagacgtagatcttttttatattgtttaaagagacctatgggagtaggtctttttttgtatgattgggggatttttaatgaattggacagttatccagcaagctctaccaatatttgcgcgcggctttgaactgaccttatggctttcattgattggcattgttggctcaattatcgtgggcattattgtcagcttagtacaatattttaaactaccagtactaagtcaaatttcaacggcatatgtcgagctagctagaaatacaccgcttttgattcaacttttctttttgtattatgcttttccagtaattggcttaaaaatgtcggcagaagtctgcggcattatcggtttgattttcttaggcggcgcatatatggctgaaggctttactggtggctttaatggtgtgaatcctagtcaaattagtagcggtaaggccttgggaatgaataattttcaactagctcgttatgtggtttttccacaaggattcagcttaagtatgccagcattaacggctaatattattttcttaattaaggaaacctcaatcttttcagtaattgcaataccagaattgactaacactgctcttgacttaattggaatgtactatcggtcaaatgaatacttactgatgttagtagttgcatatgcaattattttgattccggtgattttattattaacttggcttgaaaagagagtacggtatgcttcattcggggattaatgttttatttgaagggagtaactttgctcgcttgatggcaggactatggacttcaatttggattgcggctttgtcattaattatcggcttagctgtgggtacaatttttggtatcttaagaacgctcaaaaatcgaccgattcgctttgttttgcgcctatacctggaattctttaggatcgtgccaactgtagttttactttacttagtttattacatcttgcctagaagtttgcacgttaactggccagcaacttggatggcagtcttagccttttcaatgtgggtagccgctgaatttagcgatatcgttcgtggagcactagaatcagttcctaagacgcagcgtgaatctggcttagcgttggggctaaatcgcttgcagctatttcgctatgtattattgcctcaagcggtcaaattagaattgccagcaacgatcaatttggctactagagtaattaagaccacttctttgttaatgattatcaacattatggaagtgatcaatgttggtcaacaaattatcgaagctaataaccaacaatatccagcaggcgttttctgggtatatggttttatctttatcttgtactttattttagattatccattatctgcatgggcaaagcgtttaaccgctaaaaattaggtgaatgaaatgacagaagaagttttaagagtagaacatttaaataaattttatggtaaacatcagaccttgtttgatattaattttagtttgaacaaaggcgaagtattgacgttattaggaccatctggttcaggtaagagtaccttgcttagaaccttaaatggcctagaagaatatgaagacggcgcgatttatttccatggcaaaaagattaatcctagtccaaaggaatggcaattattgcggcagaagattggcatggtttttcagagttatgatctgttcccaaatttgaccgtaatggaaaatattttgctggcaccggtgaaagtgcaaaagcgtgatgaagacgaggttaaagaagaagcagtcaaattactaaaacaagttggcttgtcggaatatggggatgcgtatccgcgtgaattatctggtgggcaaaagcaaagagtagctattgtacgagctttagttatgcatcccgaagtaatgctttttgatgaaattaccgcttcacttgaccctgaaatggtgcgcggcgtgttagatattatgcaaagattatctgatgatgagcatataacgatgatcattgtaacgcacgagatgaactttgctgctagaattgcagataaagtattgtttttagaggatggaaaaatcttagaggatacaccaggcaaggaattctttgccaaaccgaaaacgaaacgggcacaagaattcttagaaagtatggatttttaggtgtgaacaatggcaaaaagatttttaactggattatggctatcctattcgtagtagtagtcttggttgcaggctatattggcattagccggccaggcatcaatggcactgcttcaggggatagatggaatagtgaaaataatgtttcttcaattaaaaggcgtggttatctaagaattgccgtttttggtgatttgccgccatatggctgggttaattcacaaggtaagcgtgttggttatgacgtgcgtctagcgcgcagagtagctaaggatttgggtgttaaacccaagtttattcaggtaaatgccaataaccgaattgataccttgaattcaaataaggcggatattgttctagctaacttcaccttaacgcctgaacgtaaaagtgtggctagttggaccaaaccatacatgaaggtatcagtcggggtaatttcaccaaagtcagctcctgtaactaatgctaagcagctaaagggcaagagtgtaattgtgactaaaggtacgacagcggaaaattactttactaagcaaaaaggcgttaacttgctgaagtttgattccaagacccagcagtttaacgcaattaaaaacggccgtggcgcagctttagccgatgataattcttatttgtatgcttgggttaagcgtaatcctaagtttactgttggaattaaaactattggccctaaccaatacatctctggtgcggtgaagaagggcaacaagtcactgcaaaaatggatggatcgtgaaattactaagctgaaccgtgagagcttctttacttatgattataataaagaattgaagccatactttggtaaggaaatcagacctagtgacattgttttgccgcagggaaaataaaaaacttgcaagaaacaagtaaaagaaatatgataatagttaattactaagatcaagactagtaacagattatttttctaaagagagtcttctttcaaaagctgcaagagaagatagaaaaagtctgtgaatttcatcttgggagtaggatctaatcaattccggtatttcaccgttaacgaaaacttaagtgtgggcgttgctacgtccaaactagggtggtaccgcgacgcttcgtccctattggagacggggctttttttgttttgaaaggaaagatttaatggacttatttgataagttaaaagagctccatgaagaagggcttaagcaaatcaacaaggctaaagacgaaaaaactttgaatgatgtcagagttgaacttgttggtcgtaagggcgaattaactaagattttgcactcaatgcgtgaagttgcgccagaaaatagacgtgaagttggtcaaaaggttaacgaattacgtgacttgtttaatgctcaattagatgaagctaaagaaaacattgttcatgcaatgttagttaagaagcttgaagatgaaaagattgatgttactttaccaggtcgtgaagcacatcttggttcaaagcacccaatcaacattattttagatgatcttgaaagctactttattggtatgggctatcaagtagttcaaggtccagaaattgaaactgatcactactgctttgaaatgatgaatatccctaaggatcacccagctcgtgacatgcaagctactttctacattgatgatgaagatttgcttagaagtcagacctcaggtgatcaagctagagtcctagaaaagcacgacttctcaaagggtccacttaagatggtgggaccaggtaaggtataccgccgtgatgacgatgatgcgactcactcacaccaattcatgcaaatggaaggcttggttattgacaagaacgtaactatgagtgatttaaagggtactttggaattaattgccaagcacgtttttggccaagatcgcgaaacccgtcttcgtccaagttacttcccattcactgaaccatcagttgaaatggatgtatcttgctttaactgtaatggtaaaggctgccctatttgtaaatacactggctggattgaagtattaggtgctggtatggttcaccctaatgttttggaaaatgcaggtgttgactcaagcgtttacggcggttttgccttcggtgttggtcttgatcgtttcgctattttgaaatacggtatcgatgatattcgtgacttctacaccaatgacgtacgtttcttagaacaattccgtaaggaggaaagataattaatgttagtttcatacaattggctaaaagattttcttgatttagatggtcaagatccatacgaattagcagaagaaattactcgtagcggggttgaaattccagaccgtgttcatccaatggatggcttgaagaagttagttgtcggccgtgtccttgattgtgaaggcgttgaaggtactcacttgcacttaactcacgttgatgttggtgaagacgaacctttgcaaattgtctgtggtgcacctaatgtagctgcaggtgaagatgtgattgttgctcttcatggcgctcgtattgctggcaatgaaaagatcaagaagggtaaaatccgtggcatggaaagttacggcatgatctgtggtttacaagaaatcggctttagcgatagcgtggtaccacaagaatttgtcgatggtatttacgtattcccagcagatgccgaagttaaacctggtcaagatgtatatgaagcacttggcatggatgattacattttgaacttcgacattactcctaaccgtgctgatactttaggcatggaaggtgccgcttatgaagtcggtgctattatcaaccaaaagccaaaggttgaagaaaaggttgtcttaaaagaagatggtccagcctggacagattcactcgatgttaaagttgatgaaaagcttgcacctaagttttacttacgtaagctcgagaatgttaagattcaagactcaccactttggttgcaacgtcgtctttggaatgcaggcattcgtccaattaacaatgtagttgacgttactaactatatcatgctgttaactggtcaaccaatgcatgcttatgacgctaagacttttgctaacggaaagtttgaagtaagacttgctaataagggtgagaagcttactttgcttaatgaaaaagaagttgaccttgaccctaaagatatcatcattaccgatggtaaaaagccagtaatgatggctggcgtcatgggtggacttgattcagaaatcacttcagaaactaccgatgtcattcttgaatcagccatctttgatccaactttagtcagaaaggcagcacttcgtcacgctaaccggaccgaagcttcaagtcgctatgaaaaaggcgttaactgggatgccactgaaaaggcaattaacatggctgcgcttttacttagaaatgacgctgacgctactgttgatgaaggtattcttaaggcaactgaccaaaagcgtgaaccagttgtggttaaaactactgcttcatacctcaataaagtattgggcactaagttatcagttgatgaaattgtaaagatttttgaccgtctttgctttaaggtagatgttgatggtgataatttagctgtccatgtaccaaatagaagatgggatatttcaatcccagccgacttagttgaagaagtaggccggctttatggctatgacaaccttgaatctactcaacctgttttgccagaaactcatggtggctactcagaaaaagaagaaatgatgcgccgcatgaaggcaattgttgaaggacaaggcttgatggaagctatttcttactcattgacttcacctgaaaaggccgttcgttacactaaggatccaaaagaattagttgaagttaaatcaccacttaactcaagccgttctgcaatgcgtgagaatttgatgactggattggtagatgctgctagttacaactttgctagaaagcaaacacaattagctttatttgaacaaggcagaacttatgaccatgatggtggtaaattcaacgagcatgaacatttagcagctatttactctggcaatacttttgcggaaaattggcaacatttaacccaaaaggtagacttctactttgttaagggacagttaaccaatttgttcaatgcaattggtattggtcctgaaaaagtggtttatgaggctaaaggcatcaaggggatgcacccaactagaactgcaggaatctacattgataagcaatatgttgggatgatcggaatgattgctcacgctgtaacgattgctgataaggcacttcgtggtagcgagctttatggctacgaaattgatctcgatacaattattccaatgttaactaagggcgtaactgcagtgcctgcacctaagttcccagcaattcaacgtgacctttcacttttagttgataagccagttactaaccaagaaattgaaaacgtcattaaatctaatgctggtaagtacttaactgaacttaaggtaatcgatgtttatgctggtgctcacattgatgttggtaagaagagtattgcttacaacttaaccttcttgaacagaaaagatactttaaccgacgatgttgtcaataacgcgatggataagattgttgctgctcttgaaaatgatcttgcgattaaagttcgttaaaggttgacattattgacgtaaattaatattattgatcagtgcaagataaagaaaattaatttctgaggagttaaaaatatgcctgaaaaatcttatccaatgactgctgaaggtaaagaaaaacttcaagcagaattaaagaacttaaaattagttaagcgtccagaagttattgaacgtatcaaggttgcacgttctttcggtgacttgtcagaaaactccgaatacgatgcagctaaggatgaacaaagtcaccttgaggatagaattgctcaagttgaagaaatgcttaagtatgcacaagttgttgatgcagaaagcgttgatcctaacgaagtttcagttggtaaaacaattacctatactgaagttggtactgatgatccagaaacttacactattgtaggtagtgatgaatcagatccattgaatggcaagatttctaacgattcaccaattgctcaagctttattgggcaaaaagaagggtgaaaccgtatcaattaccactcctggtggcaagtttgacgttgtaattaacgaagttaaagcctaataataaaaagggagggtagctatgactatcttcctttttgtttttttgaaaggattttaaaatgagaacagttggtattattggcatgggccatgttggtgcaaccgttgcctatactttatttacgcacagtatggttgacgaactgattttaattgataaaaatgaagctaaagtaaatgctgaatacaatgacttgcatgatactttggctagaaatgatagctatgttaatgtgcgaaagcaagattgggacggcttagaagatgctgacattattattaccgcttttggtgatattgcggcttcagttaagacaggcgaccgctttggtgagtttgaattaaatgcaagaaatgccaaagaagttggtgcagatattaaagaatcaggctttcacggcgttttgatcaatatttctaatccatgtgatgcaattacccaaattttgcaagaaacttctggtttaacgaagaatcgcgtctttggtactggtactttccttgatactgcaagagttcaaagaataattggtgaaaaacttggtcaagatccacgtaacgtagaaggtttcgttttaggtgaacatggttcttcacaatttacagcctggtcaacggtaagagttaataacaagattgctttccaattgtttggtgatgaagaacaagaaaagattagtgaacaatcaaataagaattcctttattgtggctaagggaaagggctatactagctatgctattgccacttgtgctactcgtttagttcaagcagtctttagcgatgctcatctatattgtcctgtttcagtttataatcctgaatacaagacttatattggttatccagctattattggtcgcgacggcattgaggaagaaattgaattaaagcttacttctgaagaaaaagaaaagttgcaagctgctgcagataagatcaaagaacacttgaagcaattgaagaaataagtaatattcattataaaaaataagacaggaattacatctgctgcaattcttgtcttatttttgtctactttagctttacgtcccaagctgcaatttgcttattgccatagtagcgtttataaatttttttagtcttcttagtttgatacgccttaacaacttcttgataaattttcttatttttgtcttttgtccgggcacaaatgatattgatccattgttcagaatccttatttaaaggttctacaaaaatagtctgcttatcacctaaatgagcgggaccagcaaagtcattgttaacaaccgctgcatcaacgtcatcaatgacacggctagtttgttctgatgcaacttctttaatcttgaaatggtcaggattagaggtaatatctgctactgatacaagtactttgcctttcttcaatttgattaaacctgcattttttaaaacaaacagagctcttgattcattagtaggatcgctaggaactacgatagttgctccatcgggtaatgcattaaggctatgatatttcttagaatataggcgaataggagcaatgtaggtcttaccaattgcagtgattccaccatgatttgctttattcccagcattaagaaaagcatagtgttgaaaggcattcagatcaacatcaccagatttgagggctttatcaggttgatcataaccgtcaaaacttttagtggttaaaataatgccatatttttctttaacggttttggcaacgctcttccagatagcaatatcgcctttgctggcaccaacaattccgacactaactttagtttgactactgcttttgggtgtccaaaagaaactaaaatagccagctacaataattaataagccaatgacggtgctaataataatgtgacgtcttcttctttttctcatttttatccctgccttttgaaaaaataaaaaacacccatcctgaaaaggacgagtgcttcgtgttaccacctttaattcgccaattatttgcataaccagccttcacaactatctaacaatagcttgcattgctaacgagtgcaaccccgatgctagctaaatgtcactagcataatcattctgaatccatcttcattgaatcattctttttgcttttcaccaaccagcaattctctgttaaagatttggttcaattactctattcatcaagatttttaattattgttaataatttatcatttaattttaattgtgttaaataaatttttttacttagttaaaaagttagtaacggaagaaatagtgagaaaaagtttatttttgtcgattaacaaagtagtaaatgagtgagacaaccgattcagccaacatcccaccggccatccagtacattgccatcatcattttgccggtaaaagtaaagtaggcagtaatggcgtaaacaattacccaaataattttccaaaataagttattcattcctgagcacattttgaagctcctttatttttgactagcaccagaactgctgtcaacttccatgccgcaaccttcggtatccattcctggcatccacacatcttcaggtttaatgcctctttctttagcaaaggcgtcggttaatgtcttcatatccattaacttgtatgtctttgggtgtttagggtcgaatacttcgatttgagccatcattccggcatcttcgtgttcaataatgtggcagtggtacatgaagactccagtttgtgggaattctacacgcaagcggacggtttcacctggtctgacaggaatggtgtctttgtaaccatattcatttggaaatggcttttcgccatcacgtgaaacgactgtaaagtgtgtgccgtgaatatggaatgggtgcaacataccgtgttccttagagttggtattagttacgtcccagtattcagcatgactaacttgttgcttcatatcgatccgctgcattgcgaattgcttgccgtttatcttgttgtgatcatccatagttactttacgaactggcaaatcttcagcgatttcaggaatttctggtttgaataatgtatcaggaataacactgttgtcaggtgcaaacttgtgaattctaaattcaattagtttgaaatcatcagtataaaggttaacgacatcgccatcatggtaatccttgaagtcaactacaacttgaagccgttcaccaggtgttaccaagatcttagtcattttgattggatgaggcaaaaatgaatcgtcacctgcaatttgagtcataactaggtcatcatcaaagtgcaagcgccattcacgacggttagacccacctaagaatagtaaacgaatcttttgtgttgttacatcaacataagggcgaaccgtgccgttgattaatggtgtttcaccgaagacgcccattgcatcataatcagcgcgatagtcaagttgattatctttgtggaaagtacggtcttgcaaaataactggaaactcgtcaacgccatagtttttaggaattgggagtttagcttcgttttcatctgttactactacgcccatagctaatcccatccaaacttgggcagcggtggatggacatgggtgagcatgaagccatgttaaggcagctggttgattaacagtgaattcgatttgcttttcttcacctggataaacaggggcatgacagccaccatcagtaataggaccaggaacttccatgccatgccagtgataagttgttagttctggtaaactgttttttaaggtaacgtgaactcgctggccacgttttaagaccatggttttacctaacaaaggagcgttataaccccaagtcttggtcttagctccaggcaatatttggcttttgctttcaattgattcaagagtgaaccagacatcagtatcagtttccttatccggtgcaaggactggagggacagctaatggctgagcttctacaccttgagggatgcttaatttcttgtagtggaagtggtttttgtcaaaatcttcatcttcgataaagtaattagtgtatatcttatctgtcatcttattaacaccatccttttgacactaacttagcatgattttttaccgttttcaaggcgcaagaacgctgttatttaaaggcttgcatgtctattataactatgtaatgaaaaatatttttactattttgtaatcgcttacacttaggtgaattatgttattttacaagatttgttgccttgctaggcttgcgtgtctccggtaaactaagcatgaagaggtgactagatgtataaaattattgcgtgtgacttagatgaaacgttgttgagcgcagatacgcatgtctcagtagaaaatagagaagcgattcaaaaagcagttgctcacggtgtaaaatttgttcctgcaactggacgaggctacgtttctgtccaaaatactttaaaggaaataggattagagcaggcagctaatgaatatgtgatttcattcaatggtgccagcattacagaaaataagaataatcgcgtgctgtattttgacggcttgcctaatgaaattgcggatcggttatatcggcatggggttgaactagatattgccatgcatgtttacactcaagatatggtatatacgtatcatatcgatgatgatgaacgtgcctatatgacgggacgacaccagtttaaagagattgaagataaagacttgtcatttttggaggggcagaaaattgccaaggtgctctatgagagtcttgataataattatttgcaccggatcgccgctgaattaggaccaattacgcaagaattggatatttcatattcatctaatcgttatttagaatttaaccgtaaaggtgtcaataaaggcgcgggactgatgaagctggctgagcagcttagggtgccgattgaagaaacaattgccattggtgataattttaatgacttgtcaatgattcaggctgctggtgtgggtgttggtgtggctaatgtcaatcctgctatgaaagagcaatgcgattacattactcaggctgataataatcatggtgcagttgccgaggcaattgatcattttatttttaacaattgaaaaaaataaaaaaataattgacagattaaaaatacatgatattattgtttacaacaaataaaaaaatgagctttgataaggaaagtaacttaagaaatgatttgcagagagtcttcggttggtggaagaagataatgatgaattaagtgaaaatcacctttgagctgaaagtgcgatattagcattttcagggtccgccctctatagcggcgacgtatcgctgattttgatagaatcagccgcacgtgcatgaggtagaatttttgtgagtattattctacgaataaataggtggtaccgcgttgaagacgccctattagatcaattgatctagtagggcgtttttttattatcataagcttgttgttaattttttgacttatgggagagataaaaatgagaaaaacattgaagcacttatttggcacgactgtagtagcacttttaggcgtaagtactttatctgcatgttcatcaagccaatctggtgctaaagcacctaaacaagaattgacctggatgactacctcagaaatccaaactatggatccttcaaagatggtagatacaactggtagtgaacaggcatctaatgtttttgaagggctcaatagactgaataaagcgggtaaagttgtatctggtgtggctactaaaactaatcagagtaaagatggtttgacctggacttttactttaagaaagaatgctaagtggtctaatggtgatccagtgaccgctgaagattttgtttattctttaagacggacacttgatcctaagacacaatcacaacagcaaaatgagtggtcaaatgtagttaatgcagatgatgttttagctgggaaaaaagctccgtcgactttaggtgttgaagctaagggtaaatatgaattggtagttcacttgaaacatcccgtaccgtattttaaagccttgtcagttggttggaatccgcaaaataaacacgtagtcgaaaagtttggcaaaaaatatgggactgcatctaagtatatggtttacaatggtccgtttgttcaaaaaggctggactggttcaagtcttaactggaagttagaaaagaatgatcaatattgggacaaagataaagttaaattgcagacggttaattatagtgtacaaaagacgccttcaactgattacaatctgtatcaggctaacaaattagatggtgcctatcttgatgttcaggcttcaaagagactgaagggtcaatctggttatacagtctataaactagatagaactgaatacttgactttcaatgtatccaagcatccagaactagctaatgtcgattttagaagagcagtttcaatggcacttaaccgaactcaattggctaaaacagttggtggtgctaataccgtagctcgaacttttgctggaccaaatgaatatgttgatggtaagaattttgaccagtatgttgaaagcaaaaatccagctaataagtatatgaattataaccctgcaggcgctaagaaactttatgatagagcattaaaagaattgggtaagaataagttgacctttaccttaatgggtgacgatgatgacgtttctaaaaaggttttagagtttgtgcaaagccagttagaagatacctttggcaaaaaagttgatgtaactgttagaagtatgccgaagactactagagttaagaaaatgctcaatggtgatttcgaggcagtctttactggattgacttcgggctatttagatcctaattcacaattgcacacaatgatgacaggacaaagttataacttcggtaaatggcctaacaaagattttgacaagtatatgaataattcagataaggaattaaatcctactaagcgattagaagatttgtataatgcagaacgtgttttaactgatcaacaaggattgacgccattattccatgatggtcaagcttggatggttcgaccaagtgttaaaaatgtagaattcttgggtggtaatttcagctttaaggatgcatctgtaagtaataattaggagaaaaataatgactaaaacagcttttgtaaattgtaatttattcgttggtaatgaagataatctagtagataatgcttggtttgtcgttgatgatgaaacaggtaaattgaccgatcaaggtaagggaaaatgcacagcagattttgacaaacaagttgaccttaaagggaaatatgtgatgagcggtttgcttaattcacatactcacatggggcttgattctgacttgaagaaaaaatttccgactactgaagcttcgactacttatgcagcactgcgggatctgcgtgaagctttacaaactggtgtgacttatgttcgtagttgtggcacatcctttgatgttgactgtaaattagtgcagatgcgcaagcagtatccttttgaaggtcctcaagtgatgccaactggaatggcaatgtcaattgtcggcggacatggtgatttcaaggtggggttaaatggagagcaaaatgctagtcatttggttaacggtccagaggacatgcgtcgggcagtgcgtgaacagtttgccaagggtgctaaaaatgttaagctgatggcaactggtggaattatgtcattaggtgatgaagttgatgatactgaactttctcttgaagaaatgaagatggcagtagaagaagctcattctaagcatatgacggtttgtgcccatgctgaggggagacgcggtattcattatgcggttgttgcaggagttgattcggtagaacatggtttttatttagatgataatgacttggctttgatgaaaaaacaaggtacatttttgtcaccaacattgactgcaggtcggacaatcgtcgttcatggaaaagatgttgtacctgagttctcataccgcaagatgtgtgcagtagttgatgacttttataatcatgtcggccatgcgatcaaggagggggtgagactggcaatggggacagacgcaggaacatatttcaatcgcttctctgatacacctaatgaattagtggaattggttagagcaggagccacaaattatccagctttaagagcaggcggtttgggtagtgccgaattgcttaaggttgatcaagaatatggttcgcttgaagttggcaaatatgcggatttcctagttttgcgggataatccactagaagatgttgctgcagtcggccaaaaagacaagcaagtttaccaacatggtttacgtaaattctaaatattttttaccacaaataaggcatcctcgtgagatttttcttgcggggatgcttgtttgtgtagttcaaattaaagtaaacattttactaaattttccagtaaaagcgaataaatataacccaaaatataaaaatagttcttgatttagtatgaattacgatgtagtatttaaaccatcaaacgtattactgatgatttgaataagtggagattgaaatgtcaagttttcaagaatactactcagaattacaggaactagcagggtatttactacacaatccagaattaggctataaggagtataaaacttctaaggcagtggaagcagaaattgctaagatttctactaatataaaaatcgaacattattgtaaaacaggacttaaggtaatgtttgataatcattgcccaaaaactattgggattattgcagaattggattcactttatcagccaggtcataaggatgctgaccctgaaacaggagcggcgcaagcttgtggtcactatactcaggtgacaacagccttggctttgataaatgaactgatgaaaaatgatcgtctcaacgagtttggcactaatttggcttttatttttactccagccgaagaatttgtagatcttaattggcgcaaaaagcataagttagctggtgattttacttactttggaggtaagcaggaagctatcaaacttggcgtatttgacgatattgattattgtgtatcagttcatgctataggtgaagattttgagcgtaggactattgaaattaattgtgatttagctggatttaattttcaatactttgacttctttggtaaggcgagtcatgcagcatttgctcctgaagagggggtaaatgcacagagtatagctaccctatttaccactgctttggccttcaaacgtcaacaattaaaaaatccaaatcaaattaggtttaatccagtgatgataggtgataatacagaatcgattaatgtaattcccgatcatgttagcatggggacagatatacgatactttgatgtcgaatatgcacagcaactaatgaagcaattcaatcaagcagcagaaggatgctccctagctttaggcggtaattttaagtcagaaacacaggttggctatttgcctttaaggtcgaatagagacatgaatgctttagtaaaaaatgtatttttaaggaatgacaagatttcagaattgattgaaaaccgaggctataccatggcagctggtgatattggtgatgtaagttatctaatgccaactattcagattggatatggtggttggaatggaaccattcatggctctgattttaaattagttgatccagtttttgtactggacatattcccggaatttatctttaacagtgttttagaaatatcaaataatcttaataaaatcaggacttatcgtagaacaaatcaggaatatcttgaacaattaaataaaatgggagcagaaaaatgaaatctttaaaaaattatggtccattaattattttagtgctattgattgacactattgcggaatttatagggatgcaggttttcaaaattggtaaaattgaagtttcaattctaccattagtattcgcagttattttagcgattattatttatttacttccattaaagccgattaagcaactctacaatgataaaagagtaaagtttgctggaaaatatatgattttaataatgttgccactaatggcacgttatggagcaaatgttgcacctaagattaatgaaattttatcagtaggttgggtatttctcattcatgagttaggtaatttaggtacaattttatttggactaccagtagctttattactaggattaagacaagaggccattggctcaacattgggattaggcagagaaggagaactagcctatattagtgaaaaatatacacttgattcaccgaaaggtcgaggagtcctaggtatttacttaattggaacaatttttggttcgattgtcttctcaattttagcaccagttcttttggggatgggctttagttatcaagctgttgcgatgagttctggagtaggatcaagttctatgatgactgcagcttcttcagctttagcagctctggttcctaaacatagtgagacgattctatcatttgcggcagcaagtcagttgttaactagttttattggaacttatattatgtatttcctcgcagttcctttgcaaagattcatgtatgttcacttgactagtttgcttgataaaaagaaagaagtatacccagaacatgattagagaaaataatttttataaattaggtagagatgcattaattttattgcttagtgttagtttagttttatttgttcagtagattaagttagtaaaaaatcctaagagcaccccaattacacctgctacttttgccggcctaggtctattatggctgttttctctgattggcattattatcagtatgttaatgaaacgagttccgtggaagattgttagaggatttcccattctaggctgggtgtctatcgtttcattagttttctgtttgcttagtccatattgtgttcgtgtaattaatgcagtagattttttatcattaactacatcggtattagcctttgccggaatttcagtaactcatagattgaaggatttatcaaagatttcatggaagatcttaattgtggcattatttgtctttttcggtatgtatttcatggatactttgatttctcaaatagctcttaatttgagtggaaaatagaaaaaatatataaagccacgctcaacagcgtggctttttgaagtgtgtcgggcatgacattcatctagtccaatgaaagcttggcgtaccgcaaggtggaccgctctcgccaatcctatccaatatctatttagataaaatggacaaggaattggaacaaagaggcttgcgctttgttcgctatgtcgatgactgcaatatcttcgtcaagagtggtaagtcggctaagcgcgtgatgaagtcaattacatcatggctagaaagaaaactgttcttaaaagttaacactactaaaactaaagtagttagaccaacgaagagcaatttcctaggctttaccttctggaaaacgggcgaaaactggcaagcaaagccgggagacgaccgtaaagccaagctttatgacaagattagagaattgttgagtcgccataaagcagttgctcaacctctatcattagtctttactaagataaatcaagtggtcaaaggctggggtgcaggcgtttttggctttaacgcaaaagaagtcgcaaaaatgtggcaggaggcctttgatactccgacaagcatctccactgtgatttacgctgttattcctggcagaaagaataaagacgtggtagctgattttaaggatatttttgcttaaatagaaattttctctcaaataacaatccaaacaaaaaagacgagccaatgcccgtctttttattttcttgaaataaatttttagttaaaagttagcttttttaacgtaagtgttcttagaaatacgatagaaagtcttgccgtgtaatttaattgcgcgaccataagtgttaacgcggtgacctttcttcaaaactttcttattagcacgcttgccgttcttcttgtagacataagcattgtgcttcagagtccgcttaacggccttagctttcttggcagctgtctttttagcagcagcggcatcagtttgagtcttgtcagatgtagtattggcatctttattagcagtgtcttcagcgaccttacctaaagtaatatcagccttttcgttcatggtcttgcccataacgttaagaccgaattctaagctgccagcgccttctttataagcatctgctgagaaaacatagtcaagggatgagccgtctttagcaacattttcttgcttgccggctacaccattcaatgttaggctagcaaccatcttagacatgtcttgacctttggtcattggtgctttagagccatcaacgtgaataattacttcggtaactttaccgtctttaacattaacttgagcagagttgcccaagaacatagcagcttctgatggggtagtgctgccagttttggtaatagtcatagtgatagtttgcaagtcgctgttttgactagtagcagtagttgcagcaacattagtagcaggttgatcagctgcagacactacagctgatggtgccaaaacactagcgcttgcgagtaaagcaagtgatgttaaaatgattttagtattttttctcataaaagtttcctcccacgaattttagatatcgcttacattataatcaaataaatgttataaatcaatatattttttgttattttatttttttatgagcataataaactgaataaaatatgaaactgtcaaatcttttgtgtaaatagatctttctcgtaaattgattttttaattatttatttaatcaaagtaggattctaaggtgtcctgaacctgaccaaagcctttgtggattcgattgaaatagcgttcgttgtagctcattgcctgaatgccaataaaagcatcaagcgactgttcagttggaaactctgccttaggcttagctttgcgcttgatcacattgttaaatgattcaatcatgttagtcgaataaattgaagctctgatctgcttgggatagttataaaagaccagcagatctggttctatgtctttcaagcttctgataacatggctgtaaaccttgccccatttggtatagaagtcatgcaggacagctgtggcttcttctttgtttgtctgttgatgcacctgtttgaattcgttcatgatcttttcacgatcgtcgacgcgtactttagcgcagatattgcgcatgacatgaaccaaacagcgttgaaaatgagctttaggataagtcctggccaaggctgttttcatgccaacaacaccatcagaaagaaaaagctcaacttgctttaagcctcgggatttcatgttttgaagcatatctgtccagacttcaatgttctcgctaggtgcaatgcagtagtcaatgacctccttgtgcccattaggcttgatgccaatggcaatatagactgcttcacgctcaaatgtttctcggcgcaaaggaaggtatgtcgcatccaaatagacacagaaaaacttgtcgcttagcttgcgtttgtggtaagcctcaacctttggaatcatctgcttggaaatatttgatacctgagctggactgtaatggctgccatacatcttttcaattagatcggctatttccctggtggtcacgcccttggagtaaagcttgataatcatgctttccaagatatccgagtgctgcttgtagtcaggcagcgtgtgctgatgaaattgaccgttgcgatcccgaggcacttgcacttcaattgggccaaattgcgtatcaactttgcggaaataagcaccatttctagagttgccagtattccagccatttctggcatagggatcatagcccagaaaggcagtcaattcagcttctagcaagttattaacagcctgttgtagctctttgcgcaataaatcatttattttgtctggattgaatagagcttgagcaaaatctttggtaaaatcattcatgaaggagttcttctttctgtatgtgtttttttgttcaaaccaatcatacgagaaaggaactcctttttctaatgtttaaagaaataaatttaaggaatcattcatccttacacaaactattttacagtctctaaaatatcatcttgaaaccgattgcatagttattttaagaactttataatagaaaagactaatagtattaatagtaaaaagaaggatattagaatgaataaaaagttacttaagttaatcgcaagtagttcggtcgcaatgactttaatggcacctggagtggcatttatgcaaactaatccggttgtaatggccgctgaacaaagtcaaaagacagtgggaatgacggtttacaaatacagtaaaaatcaccgcagccatgctaagtcaatggctcaaggttttgtgggagataaggtgcaattaacagttagtcaaaagcatgtgactaagatgacaatccatgtcgatggtaaaaatagtccaatgggcaaggggcaaaacgtaaataagattgtaaaatccctcaagattaatggcgttagcggtaaaaaggaaaatgtttccgccgacaaatctagttttgactttgtttttgcaggaaaagctttcaaaaataatggttgggtcaagatgcaagtcactattgactttggtggtaagatgaccgaacaagcttgggtgaagtatgacaaggttagcggtttaactactagcaagaaaaagaccgacaagaagcaaaagaaggctagtaaaaagagcgtcaaaaaagttagtaagaaaagtacacacggtcagcgcagataaaaaggttcaaaatatcaattatgcggtctataaggcggatcgcagtggcgtttctgcagcaaataatttttacactcatcatgccaggattgaaaaagtaaagcagggctatgttatgaccttaaaagttgaggtaaagcatgggatggtgaccaaatttcagccggtttcactgggaattggttcaatttcaaacctgcgttttaccaaacaagctggcaaggatatctggacttatcaggtacacttcaagtcgctaaatcagttgaagaagcaggctcaggggagtctgcgcttgagcgtaccaattgccaatattcatgatcgtttgtttaaggtctggtttgcttttggtgtaaaaaatgtggcgcacagttcgactgtaagcaaggcattaaccgaagcaaatagtagcactgattcaagtagtactagtgatgctattactgcagctaatgacgacagtagtaaagatgcaaaaaatgctacaagtagcgctcaaccgcagtcaaagccagttaaaaagcagcagtcttcttcaaactctagtgtaaaacctggggcaaagatgacacccaagaagaaaaagatggcgacgattgcagcggtggaatatccatttttgcctgtgatcgcaggctttttagcatttgatgctgcaattattggtttggccttttacttaagaaataaaattttgaagagaaagaaataatgaaaaatatagctaaaattatctcttttcctttcttgttgctaacttgtttgtttattttttggtgtgactgttagtgcacaaagcgtgagttatcgcacttacaagtatggcacgcatcagacctcgatggctgatggctactatgcgcgtcctgctcaggttgtggtagacgacaatcagtacctggtaacgatgacgattcgcactaagaaagatctaagtccctatccggttcaggtgttaacgattgatggacaagcaccgctaaacgtagtaaaaacgcggcatggcagtgactatgattatcgctatagttttcgcactaataatttaaaacgtgatatttctagtcaaattaaaatagatgtgccacatgtttaccaagcaacacacaatattacttttgcttttgacactacacagttgcctaagttaacaaataaaaaagagcgagcaagtcatgcggaaagtgcgataaaacgcagcgcgccacaggtgaaaaacaagagtgttaagcctaaggagcaattggcacaaaagaagcaagcggcaatagctaacaggcaaatagcgcagaatgcacgcaatcaacgtgctaatcaacaaaggcagcgaaatttttattatgttattttggctggagtgcttagttcgttaattttaattggcgttgctgttttgattgtcgtaaatgccaaggaaagaaaaagtaaatgaaaaaacgtaaaggattaattattggtttaattatatttttagtagcaatcgtcggagtggcaattggtgctaaacgattgattgatcaaaaagttgccaataatgaaaagattgttgccacaagtgcagcgattactgaaatttttgataaattgaacgttaatttagcaggggttccaaagacgcaggctaagttaccagcacgctatcaaaaggtgcccaagattgggagtccaatgaagccaagtgttgaaaagattgcttctttgaatcctactcgtgtctatgcagtctcaactttaaaagatcagtatgatcaatcatttaaagaacaaggcgttaaagttacatatttgaagctggattcagtagctgaccttgaagctacactgagttcattaggcaagcagtattaccggcagagacaggctgattatcagattggcttaatcaaaaaagccgttaaaaaggctaaagcacgtgttcacggtcgtaagcctagagtattgatcttgatgggcttgcctggcgctaattacatgattctaactaatcgatcatatttaggtgatttggtcagaatagctggtggggaaaatatctatcactctgatagtcagatttatttgtcaccaagtaatgactcgctagctactaaaaatccagatgtcattttgcgattagaacatgctttaccaaatgtaactttgccacaatttaagcaagagtttaagaaaaattctgtttggaagacgatgaaagccgtaaagacaggcagagtttatgacctacagcaaccagactttaatgcttcagctaacatgaatgtttctcaagcattgaataaattaagcaactggttgtaccctggaaagtgatcaaaatgaagaaaaaggtaatttggataaacttgattttagcagttttgttaatcagtacgattttctttgcattaactcacggagcaagcaatttttcaatgcaaaagatgactaacagccaattgaatattttgtttaatatccgtgtcccgcggattatttcggcactagtagcaggagctagcctctctgttagtggtgccttttttcaggcaactttgcgcaatccgattgcagaacctggaattatggggatctctagtgcagccagtttatgtcaattgctagcggttattattttgccagaaattttctttggtaaaattattttcgcgattattggcggactgctagcgtttgggcttcttttattattccaaaaaaagatgacgccttatcagttaattatcatcggagtggcattgaatgcagtgttcacggggatgcaggaagttttcactaatagtcaaaatagtggcagcagcctggccacaagtagttggggatcgacgatgtatttattgattattggcgtagtagggctgattttcgcgatttgttttatgaattgggctaattacttgaaggtcaatgatgaagagctgacgtctttaggtgtttctgctaaaaccctgcgtttagtcttgatgctaattgcagtggttttggccgcaacaacaacggcttgcattggtgttttagcttttatcggaattattgtgccacaggttgctcgtttgcttttgggatatgattatcaaaaaatcattccattttcgatttttgctggagcttggtttttattgttcgttgacaccatcggccgggtgattacagcaccgaatgagattgcggctaatattattttggctattgttggtggtccagttatgattttaattttatggaagaggcagaaaaatgcttaaagcgtcgcagattgatttttcatatgggtcaaaacaattatttaatcaattctctctgagcctgcaggagcaccagattacgactttaattggtcctaatggatctggcaagtcaaccttgtttcgcttgcttacacgggcaataaggccgtctgcggggacaattacgctagatgggcaagatatctggcagctagctgcgaaggattttgccaaaaaggtagcaattgtccaccagcagaatcaattgtatgatcagataactgtcaaggaactggttaaaatggggcgtctgccgtatcattccttgatgggggatgaagaaaatggatctgctcgccttcaacagattatgcaggagctagagattgctgatttggcagataagtttatagcgcaattatctggcggtcagcagcagcgtgtgtggcttgctacagcactggcgcaagagccggaatatctttttctagatgaaccaacaacatacttggatttgcattttcagtatcgctttttggatttagtgaaaaaattgaatcgaaagcagaatttgacgatttgcatgattttgcacgatttgaatcaggctttgcaatatagtaatcaggtaattttgctcaaccaaggcaggattcaaaagcagggcaggccagaagaggtaattacggcgcagacgattaggcaaaactttggcatagattgcgagatgatcgaaactgagcagggaaaagtcttgttaatggcaggttctgaggcaaaataaaagaccacgagaaaactcgcggtcttttttgtaataataaattattacttgttaacttcatccttgaagctcttacctggcttgaatgctggaacgtttgatgcagcaatttcaatttccttaccagtttgtgggttacgacccttacgagcagcacggtgacgaagttcgaaggcaccgaagccaactaattgtaccttgttgccttcagcaacattgctcttaacaacgtcgatgtaagcgtccaaaatagtgttaatgtctgtcttagtagcatcagtctttgcagcgatttgatctactaattgtttcttagaaatagtttccatgaaaaatacctcttttaatataaactacgattacttattttaacagtaatccgcgtatttacaaggggaaacagcctctttaaagaatttttttaaaaaggaaagaaattctatgtatttgaagcgaaaaatattgtattcgctatcaaaaatgtagttcatgtaatgattcttttgttttgatttgaaaaattaacttttttcaaaaaatttagacattttttgcgtaataaatgatgggagacaagcctaaattttgaattccaaattttgtacagtgatggaatatataagagaggtgaataatctttaattacacaaaccacatcctcgaaatatgcttaaacaatatcaattaagaacgttgaagaatggattaagaatggcaggtataagactatgagcctactaacttataaaggttaccaaggtacttatcgaagttgaaaatgatactttatttggcgaagtcttaggtctagaaaatacttttatttcttatgaaggaaattctctggcagagttgaagaaagatttcaaagcgggtattgatgattatcttgagaattgtcaattgaatcatgagcaaccagaacaggctaaccaagatgcagctaagttacagttgcaaaaattattattaacatcattagcgtgattggaacaaaataaagctcgaaacttctacaaattgtagtaacttcgagctctgcattaatctgtttttgttcaatacaacgcatgctattacatattggcaaatcgatctagttcatcatgtgttcctaatgcaaccaaaactaggattagttcatgtgtttctttatcaatccggtagtacaatagccaatcgtcattatattgacgattaacgtgcattttgcgattttttcctacagggtgatctttatgtttggctagaaattctttgtcattggttaatattgcttcaacacaatcatcaacataatccattggataatgttttctttcatatctcttgtaagcgcggtagtagcgcttggtaggattaacttgcatgattatttccgcatggcctttttgtattcttcaaaagagctataacttccatgataaatgtgattatcagcttcatagttcgcttcatctagttctgtcatgggtcttagttctaaaggaatgccattacttctaacaatagctttgaaatacattctaattcctgttgatatgtcaaccccatatgaagcaagaatatcttgagcttctttttttaatttatcatcgatttttacactaatttgagccatagtacaacctctattcacaaaacgtattactttatctatatagtactatatactataaatacaaaatatcaatttttagcgtttgcttttaaaagaattttaaaagattataggtagtcttattatgaatactaggggaaaaaactaaaagtgacatttatatctttaatcgtaatacaccagcagaaatttaaacataaacaaagctcgaagcttctacaaattgtagtaacttcgagctttttgtaactattcagaaaagataatttagcggtcttcgtggttagtgaagtaacggtagtccttactcttgtcgaacaatacggcacgagcgttttcaccgttggagattgagaagatagcgtcagggtacttgttcttaacttcatcttctaccaatcctctaagcatttcgttgttagctaaaactgaaccggttaaagcaatcttcattggcttaggatcttcgtaacggtcaagaccgatgatgatgtcacgggctaacagatgagcttgtttcttaataactttgattgcatcatcgctgccttcatcagcaagttgtgcaacgtgaacagccattcctgcaacttctgggttagacatcttgtagaatttagcgttacattcatccatgtgttcaacgccaaataatttagtaaacatttgaatcaaagcgttgtcttcacgcttgtcccagctaagaagagcagattgcattgctgaacgagcaattgcgtaacctgagccttcatcacctaagatgttgccgtagccaccaactgcgattaagtggccgttttgtaaaccgttgtaaactgagccagtaccggcaattactaaggcaccgtcatcaccttcaagaccagcgtaaagtgctaaaagtgaatcagtaatagcacgagtaggtaagttgttaattcttgatgaaatagttgcggcaacttctggagcattaccgacaactgaaagaccggcaataccaacaagaacgcgcatgcagtcaccatcaaccttgtcgatcaattcgttgatagtgtcagagatattcttaattccgccttcgtagtcagcgttaatttggcctgggccgccttctgcacgaccgatttccttgccagtttcgtcatatgcgattgcagttgagtgggtaccacctgcatcaacaccaatttggtatttaagagccatgttgtaaatcttctttctatattaatttatccgaatgataacgtatacattgtattatatttttatacagtaggtctagtaaaagttttgctgttagcgctaacagtggcttttttcttgcaaattaataaaattgttaaactaattaagctaaccaacatccccagtagaagaacccatggtacataaattaatgtaatttgatgttttcctggattcaacttgaagtttaaaaaagcattcatgaacaaggttttattcttgttaattattttgccattatctaaaactaaccagttaatgttattaggaatagttgacgccaatgtcatcatcttcttcgttgtgaaatgattagatttgatgatcaaagcagatgtttgtttaaagtttggttgtttttgcttaaaacgatgtataatctgctcgagcttttgtgtgtttaagcgccagaagtgaatgccactaaggtctagtttatctttttttagttcaaaagtaacttgcaaccgttgaccacgctggtggctacctagattaatgagacgggcattttgatcacgtactgccagattaatattagcaccattaactgtcattgaaatggcattatcatcgatctcaccgggcatttcaatgtagtaagaatcatcagtctgtggtttgaaattgaaaatgatgcgtgcgatttgcttattgtttttacgattatattgtagttgatcgtttttcatactagttacattaattaattttgctttaggccaattgatctgcttaaacagctgcacttttgcccctgtaactgcttgaaagaatttggtttgattactagtaatatctagagagttaaaattgattttttgcgttttttgtgatgttaaaaagagtaggggcaaagcggcattatttttcactagatatagttgggaaaagcgtttttgcaaatgataatcgctggcatcaacgcggtggttggaattgtcatacttcatttgcttaccagacttgatcgttgtgatttcatcattgggcaaaagataatatttgattccaagtaaatcatctgtcaaagtagttccgccaaaattagtgtaggaattactattgtttagaaatccaagattgttgatcaggttgagtactttttgatcagaaatcgaattaaaattacttaaaccgtaataaccagcgctaaaaggatcatcatcagaacgatagaaagtcttttcagttcggtaaaatccagaatcatgttgatttgcgtattgtactgcttggctgacattagtggtaaagttctgataatcgctatttttttgataagctaaattgcctagagatagtactaggttgacgattaactcaagctcgataactaaataaaaaaatggcgcggcaaaactgtgttgatgataaataaagccaataaacaagattccgagggctagaaaagctcccgtggcaatctgcgcatcttcagttagaaagtcaaaatgtgaggcattaaatactatataaacaattaaacctaaagaaaatagagtcagaagtccggtctgccaataagctatacgttctttttgttctaatgcaataacgcctagatttagcgcaaaaaagatcaacacaaagctgaaacgaccaggataccagacagggaattggcctaaatgccagagtaaaaccagtggtgtccaaaaaagagaagcaattaagaaaatgagtaaaattccgtttgctaatttacgctgccagttaatctttttgcttaaaaaatataaaattgtcagcaacaagaaaggcattgtcagataaatgttgggcatcccttcctgcatttcatgaaagttataggccccttcggctaacttagtcagctgttcaactggagaaaactgccagcccaaattccatgaggcagtagaactagccttgccttgcaacatttcaatcagaacggggaagagcataaaggcatctaaaaatgaaccagcgatactttttcttaaataaatccagttaaggcgtaggcgctcctgcttattgatgaagaaaattttgcttaacagataaagcaaaccaaaggctaatgccataaatccggtataaaaattagtgaaccaaagcaaaaaggtaattaaaattaacttattttttcgttgggccagcaagcggtcgatggcattaatcaataaaggaagcaaaatcacagaatcaagccacatcagattatagtgattgccaataacgtagcctgaaagggcataagccgaactagccgctaaagcgtaaaagtgattagtgattttttgcttccaatagtagtaggaagatagtcccgccgctccaatttttaatgcgataataattaaaattgcttgtggcaaaaaatgttgcggaaataaaaataagagtagattgaaaggactgcagagataataggcatcagttgctagcattgaaccgcctaaaccattagaaaaggaatagattaagcgcaagggatgggagaacaaatttcgcctgaagaaggcaagaaaatcaacatattgttgacctaagtcgacagtgagcactccatttttgctgtagaaaaagtaactcaagaaaatcaaagccggtagcaaaaaactaagccagaaaaaaatatttttacgattaattgcaatgtgtcgtgagttaagaaatttaagcatcattaaaaattatataagctcccttatgaattgtagaattgatgtttactttttgttaaaatacatctagttttaataaaggtgatttacgtgaattattttagaaaaaatagtgggactggctcaaacaagcattcctcaactccaattagaatgcgaatcattctaggggtaattttagtcctctttgccatgttaattgggcaattggcttatttgcaactagtttatggttcacgtttcaaggcagaagtgcaaaaaactgattcaactgttgtttcgcatcaagtgccacgtggtgtcatgtatgacgctaagggacgcgttttagtaggtaataaagcaaccaatgctattacttatactaagagtgcctcgactacaacagcagatatttacaagatatctaatgccttgagtaattatatcaagattagcgatgaaaagccgacaaagcaaatggcagcagattattatttagctaatgaagataataatactaagatatctaatgctttgccgaagtcagccaagattgatgctgatggcaataagaagacttcagctgaaatctatcaagcggaattggcttatgttgaaaaaatgaatcctcaactaaccactcggcaaaaaacagcggctttaatctttaataagatttcaggggcttatactttatccacgatttatatcaagaataaaggcttaaccgatcgtgaaattgcccaagtaggtgagcacttatcagagcttcctggtgtgggtatcggaactgactggcaaagatcttatccaaatggttcatctattcaaagtatcattggttcggtttcaactgaaaaatctggtttaccaagtgatagcttgcagtactacttaagaaatggttactcacgtaacgaccgggtaggtacttcctatcttgaaaaagaatatgagccacttttgaagggaactaagtcgactaaccaggttattactaaatcgaatggtaatatccagcagactaagactgtttataatggtcaagccggtgccagcttaatgttaacgattgacgctaagtatcaaaagcaagtacaggctactttgaaacgggtttacagtacagctgttggtaacggtgcagcaagatactctaatggtgcctatgccgtggcgatgaatcctcagactggtgctttgctagctgtagccgggattaatcgaaacacgaacactggtaaaacgactgataatgctttaggtgtaattaaccaatcctttgttatgggatcagctgttaagggggctactgttggtggtggattaattaataaggttattactcccgaaaacaatactttgcctgatacggcaatttatttgccaggttcaccagttaaaaagtcagtttatccagttggtactttcagttcattggatgctgaaacagcgttggaagtctccagtaatatttacatgatgcacttagcaatgaaatgggttaaggctagttatgtaccgaagagctacattcatatgccaaacgatgcctttgacattttacggcgtaattttgctatgtttggcttaggtcaaaagacaggcgttgacctacctggtgaagtgtcaggaattgaaggtaagtcatttaatgacaagggtaatattctttccggttctgtacttgacctagcttatggtaactatgatgcttatacaccaattcaactagcccaatatgtgtcaactattgctaatggtggtaagagattgcaaccttatattgtgcaatcagttggtaaaactagcaaaaatggcaagaagatttacattagctacaataagaagccaaatgtccaacaagtaattccttggacgcttgcggaacttaatgtggttcaaacagggttctatcgtgttgttcacggtacaaatggttggggaactgctcacccattgaaaaatgttaagccatcaatttctggtaagactggtactgcacaaactttctactatgatgctgaacaccctaatagaaagcacaatatcgaattgattaatgcaacctttattggctatgccccatcgaaaaatccaaaattagcagtggcggttgttttcccaggattagaccctgatggtgaaggaacatacacattgcaagttgccaaagcaatggtacaagattatttcaaacttcattcaacaaaataaagaataatactggtcaaacagcttgaaaaatgctattctagtacagtcagaataaaagtgtaggtggtgaaaaaaatggcagataacatcattttagaatgcaccgaatgtggcgatagaagttacttatctaagaagaacaagcgtaagcatccggaacgtttatccttaaagaagtattgcccagttgaaagacgcgcaacacttcaccgtgaaactaagtaataaaccaagatagcaggttacgtgcctgctattttttgttttttggacaaaaagatggaaaaatcagaattaagaaaagaacaaatcagtaaattaaaagaatttgccaatactaaagaaaaaagagcagaagatgcgattttattagagaaattaatgtctacagatctaattagaagaagtcagacgattggggtaactgcttctttaccactagaagtagatacttctgaattaattgctcgtttgtgggataaaggaaaagaagtttatctggcaaaggcacgaggcgatcaaaatcatactttagactttttacgctatacgtatatgagcaaattggtaaaatctaaattcggtgtggaagaagtcgccgatgaagatgcgaaaatcaataatgatttggatttagtcattgtgccaggtttagcctttgccttagattcgcatgttcgacttggctttggtggaggttattatgatcgctttttggctaagcatgatcctaaaactgttgctttagccaatagcaagatgacgttcgatactagcatttggcctatcgaaaaaaccgatattccggttcaaacaattgttactcctgataaaatttattaaaatagtcacaatgacgaagataaggggggattaaatgaatactaaacgaaaaattaacctctcacaatcatttgtgactttaggaattttagtagttttattaatagtctttttagttgaagtgtttttaggtggctcagagaataccaatgtcttgatgaaaatgggagccatgaataattttgcggtggtggctggacaccaatggtggcgcctatttatggcccagtttttgcatattggcatcatgcatttggtttctaatgccattattatttactacatggggcagtatatggagccattaatgggacatgtgcgctttttagtgacttatcttttagctggggtcggcggcaatctaatgagcttggctttcagtgctgatcgcggcttaagtgctggtgcctcaacagctttatttggtttgtttggggcaatgactgccattggcttgcgcaatttgcataatccaatgattgcttttttaggtcgacaagcctttgtcttagctttgattaacttagcgcttgatatttttgtgcctggaattgatatctggggtcatattggtggcttaattgctggcttcttattagcgattatcttgggcgatcgtgtaatgaagacctacaatcctaagtggcgcgtattggctgctgcagtgttagtcgtatatgttgtttggacggttagaacaggaatgataattaatttctaatgaaaactctctacgatgtacaacaattattagaaaaatacggaattttggttcatgtgggcaaaagaatttgggatattgaattaatggctttagagctcgataatatcaatcgtgccggtctgattgaccaacatgattatttgattgccaagatgattttgagtcgagaacatcgaattgaagtcaaaaatgaacaaaaaaaggcgctcaaagatccgaaaaatgatagccagtaaattagtttagcggtatcataatagatgtaagttttttatgaaagggcagatttagtttatgtcgagttttttaattgtcttagatttagttttattagtcattattttagtcatggttggtatctgggcttggaataaaattcaagctaaatcaatcggtggcgaattgactaatgaagaatttaaagaaggcatgcgtaaggcacaaattattgatctgcgtgaaaaagaaccgtttaaacgcaagcatattgatggcgctcgcaacttgccatataccatgcttaagtatcaatatactgagcttagaagcgacttgccagtttatctttactcagattcaaagaccattactttgagagctgcccgttttttaaagaaaaagggttttgtttctatccattggcttaaagatggctttgaagcttgggatggtcgaactaagaagtcaaaatattaaatgaaaagaagacgcatttggagggggtaactctaatgcgctctttttttgtatcaaaattaagaaaggtgatggtgatgaaaaaggtactagcgattgtaggaccaacagctatcggtaagacaaacttggcgattgatttagctaaaaggttgaacggcgagattatttctggcgattccatgcaagtttaccaagaagtggcagtgggaactgcaaaggcaactgcagaagaacaagcgcaagtgaaacactacttagttgatacgcaatccgtttttgacgagtattcagttaaagattttgtggatcaagcaacaaaagcgattgaagagattagccaaaaaggtaagttaccaattattgcaggcgggacaggtttttatgttaatgctttattgaataagatgcagctaggcgagaaaactccagaagagcgtagcgtttcgcaaaagtgggaaaactacctcaaggaaaaaggcgcagaaaaattgtggcaggtcttgaatgagcaagatcctaaggcggcagaaaaaataccagtagccaatagtcgcagaactatgcgagcattgactgtgattgagcgtacaggcaaaaagttttcagagcaacaaaagcagatcgagccgcgttatgattacttgattattggcttgaattctgaccgtcaagagatatatcgcaggattaatttgcgtgttgataagatgatggagcaagggatgctcgatgaagcaaaatttatttatcaaaatcgagcacgagagtatcaggtcttgcaagcaattgcgtataaggaatttttcccttattttgaagagcaagagacgctagagcattgcattgaagatttaaagacagcttcgcgccgctatgctaaacgtcaattgacttattttagaaataaattaccagtagtttggtttgatccgttagatgattcgggttgcgaacaaaagatattgaagaaagtcaaggaatggaaaaatgaataatttgccagaaaaattacaaaaaattgttaaagaagttgatcaacagatcgcacctaaactggttgagattgaagatcaaattgtctataatacggctaaagttttggcggcttaccaagctaatgatgtcgctgaagccgatttaaatggggctaatggctatggcgacgatgatatgggaagagataagctagataagatctatgctcaagtttttcaaactgaagatgcggtagttcggcctcaatttgtttcaggtacgcacaccttgtttgtagctctatcaggcaatttgaaatacggcgatacgctaacttatttaactggacagccttacgatactttgcaaaaagtgattggcttgactgatgataagcgtggtactttagtcgagcgcggcgtgcatttttcatatgtgccgttaaccgatgatgggttagttgattatgacgaggctgaaaaggttcttaaacgtgatcagcctaagatcgttgccattcaacgttcacgtggctactccaccagaaagacctttacagttgatcagattaaggacatgattgcctttgttaaacgggtcagccctaagagtattgtctttattgacaattgttatggcgaattttcggaaaaacatgagccaactgagtatggtgctgacttaatggcaggatcgctgattaagaatgctggtggtggtctagctaagaccggtggttatattgttggtaaaaaagacctggttgaaaatgcaaaacttgcattgactgctccaggctgcaccgatgagggcgccactattggcaatttgcatgacttttatgaaggctttttcttggctcctaatgttaccggtatggctgaaaagggaatgatttttgcggctgctttgtttgccaaaatgggcttgaatgttaccccagcttgggatgagaagcgaagcgatattattgagacaattatttttggtgatcctgataagatggttaaatttgtgcaagaagtacagaaaaactcaccgattgattcctttgtaacgcctgaagctgtgcatatggagggctacgaagataagattattatggctgctggtaattttgtttcgggttcaactattgaattttcagcggatggtccaattagaccaccttatgcggtttatatgcagggtggcttgacttatgcgcatgacaaagtagctattattaacgcggttcgtgatacattttttaacaaaaaataaaatttaaaaataatcactagaccaatttgacttttttaaattggtctgctattgtattaaacagttctaggagataagaataaatcataggaccataccaatttaatattttttgtttttataggtgaattaactatgagtaaacaatatactgcagaagaaattaagcaagaagttgaagacaaggacgttagatttttacgcttggccttcactgatattaacggtactgaaaaggccgttgaagtacctaagagtcaattagataaagttttgactaatgacattcgctttgatggttcttcaattgatggctttgttcgtcttgaagaaagtgacatggttttatatccagacttctcaacttggacagtattgccatggggtgacgaacacggtggtaagattggtcgtttgatttgttcagttcacaccactgatggcaagccatttgctggtgatccaagaaataacttgaagcgtgttcttggtgaaatgaatgaagctggattcgacacttttgatattggttttgaaatggaattccatcttttcaagttagacgaagatggcaattggactactgaagttccagatcatgcttcatactttgacatgacttcagacgatgaaggtgcaagatgccgtcgtgaaatcgttgaaactcttgagggcatgggctttgaagttgaagcagctcaccacgaagtaggtgatggtcaacaagaaatcgactttagattcgatgatgctttgactactgctgacagatgccaaacctttaagatggtaacgcgtgcaattgctagaaagcacggtttgtttgcaagctttatggctaagcctgttcaaggtcaagctggtaacgggatgcacaacaacatgtcattatttaagaatggcaagaacgtcttttatgacaaggatggcgaattccacctttcaaatactgctctttacttcttgaatggtattttggaacatgctcgtgccattactgcaattggtaacccaaccgttaactcatacaagcgtttaattccaggttttgaagctccagtttacattgcttgggctgctaagaaccgttcaccacttgtacgtattccaagtgctggtgaaatcaatactcgtttggaaatgcgttcagctgatccaactgctaacccatacttgttacttgctgcatgtttaactgctggtttgaatggtattaaagaacaaaagatgccaatgaagccagttgaagaaaacatctttgaaatgactgaagaagaaagagcagaacatggtattaagccattaccaactactcttcacaacgcaattaaggccttcaagaaagatgatttaattaagagctcattaggtgatcacttaatgcacagcttcattgaatcaaaggaattagaatggtctaagtactcacaatcagtttcagattgggaacgtcaacgttacatgaactggtaaaaataaataagtaattggaaaatctcgtggtgattgaggccacgagatttttttgtaaagtatagatttttcaaaagcatatctaatcgtaattagtctaattacgattagataagtgaacttatggataagtttttaaatctagtaggataaacttttaccaaaaatcaaaaaatattctcttcaaagaagagcaaactgctatataattgtaataatgactggactggtatccctaattagtttagggatacttttgtgttaatgagaatgtattggagtcgatggaatgagaaataagacattagtagcattttgtttgatagctgcaatgatcaatttaactgcttgccaatcgcaaaagcagactaataatcgccaaactattgaaaaatctggtgtgactcagaaacagactcccaaaagattaattgttaagagtatgtcagatactgaaaaatctagtgcaatctcaatttatggatcgatgaaatatggggatgcatggaagactgcatatagtgatgccaagaaaaatcgtttgagcattagtgtaaaaaatcgaactggttttaattggataaaaaaaggtagaggctacatttatgaagtaactggcaatggtcaagaaaataatgctttttatacaatgaaaagtgaaaccgtatatttttataatcagaagaaaaatttaggtgtagcaagtttatctgaaatagcttcatatttaaatgaacataatcaagtaaaatctgtagaaaaattagcaactaagactactttggctgctgaagttacatctgacaaatatggggttaagggtgacgatggcctagcattagttccaacgagacttttgggtacttggtacaactataaaggaaagaagttagtaattactgatcatactgttaatggtgaagaaattcatcatatttctaattctggtgtagcagcagaatccttagatcaaacgaaaaagtgggctagagctcggatcgaaaatattaatggattaaattgctatcatgttcaaacattgaatgcccaagattttggcttactttattctgtccaaaaagataatggcaatacggcagtagtaacttatagcgttgatacaggtcattatacggctacttattggaagagcaccaagatagccaaggaacaccgaaatgcagaatttaagactttaaattaatatttgtaaagaagtattaaaataattgcaatgaacaagaagtataatttttgtaaaataatcatgtaagaagttggcggatcgtattttttataatactattaagcaaagagatagaattattgaaagaaaaggggattccttttgaaaagtaaattaactgttttggttgcaatttcagctgctttaactttagcaggatgtagccaaagtacacaaggtaatagtaattcacaatcacagtcagaaaaatcaagtcaagtttctaagagtaactcagaaaaaactggcacctcagaatcaagtaacagtcaaaactcagcaaaattatctgctgagaatatggactataagacgcaggttagtgcaatctctgtctatgctgcacaaaagtatggcgacacttgggaaattgcagttaatgctgccaaaaatggtaatttaggtgttgcgttcagaaccaaagccgcaacaggtattacttctgatgactcaggatatgtttatgaggtctccggtaccggtaaaagcagtaatgctcgttacatgctaaacggagatggagcacaaaagaaaattactatttttgttaagcaaagaaaccttggtactgtaactttacaagatgtagttgattacattaataaaaataatgatgttgatctagttcaaagcttggctaaaaatgccaaactagatgttaaacttgaaggcgataatgacaatgcagctggtgctaaggaatctgctagtgccgtaattccatcaagcttgcaaggtacttggtacactgcagatactggcaatggcaatatcgatactttgactgtaactgctaataagatcaatgatgaagctggttttagcatggatgtaaaggctaaaaattcaggttcatcaactagttcaggctatatgaaacaagctactattaatggaattaatttctatagttttactaatatgggtcaaaaaccaggtcaaggcagtacatatttggcaccgcatactgaaaatggtcaaagtgtaattgtttcagctaactctaagggaacaactaatgctgtctactggaagagcgaagccttggctaagcaaaactccaacaagcaatttagcgatctacagtattaaaagtgaatacaatatagaactaggcgatatctttgcgatatcgccttttttgttgtaaatgcgcttttataaaaacttttacttacgaagaaaaatttaatggataatactcagagtgggggtgaaagctcgcatcatgttcaacggccttggcgtgctattcttccattaatgtttggagcatttttgggatgttcagtgaaacttcgttgaatagtgaatggaagtcgttaattacttagtatttggagtggctaatactttttttgatttctgtaaaactaatttactgtcaataaattttataatatgatataatttctgtaactaaaaatagttgcaaggaaagaatggttaatggtaaatcacaagaagacaatagaaaagatcaaagcagaatcagtaaatatagcttatacagaagcggaatctttgcttgaatggttaggctatactaaactaaataaaggcaaaacaagtggctcacgtgttaaattcattaaagggaataagccgatatatttgcataagccacatcctagaaaaaacttgttaaaatatcaagttaaagatttaaaatctaatttacgaggtgaaatctaatgaaaaaagaattatcatacaaaggctattatggttcagtagaatattcattagaagacgatgttctctatggtaaagttattggtattaaaggcctcttatcatatgaaggacaaacattagatgaattaagaaaagactttcaaggtgttatagatgaatatttggaagattgcaaggttcaagggattatgcctcaaaagtcgtataagggttccttcaatgtaaggattacacctgaattgcatatgaaagcagctgcttatgcagctagccacgccgaatcacttaatagtctggttgaaaaagctataaaaaaatatgtgaatgcttaagcaatgtagtttttagtggctgtggtattttaaggagttgctgaaaaatgcaagtgctaaatgatttgaaaatgccgaataaagaaacactatattttaatgatcatattgtcccttggatagaaaaagaagagtgggctaataatgagcatacagaagtcgctttaacttttaagaaaaacaccccagtagatattattaatagatttttgatttgtcgatctgaattagctattaactatactgcagattataaaattgtataggaagaccacatgttgtatccatatgcagaatttcctggggaattgtcaattacatattctcaaataatggtagacgataatgtaaagggtggtaaaaaggttttggtccactttgaacaaccgacagattatggatttaaagaagccagatatgagttgcctgattataaagaaatttacaactacgactttacaccttctgaaactagaaataatctagatattcttaagagaaacgaaagtctaatttggaagtgtgccgaagaggagaaaacaagtacctaattattttcggcttaaaaattttactatgactacaattgattttcatgactaataagaagaactcactataagtgggttctttttttaataattacaccactataatatcttaagtaaagctaaaaatgattcagttagaaaagagtaaatatgaaagtctaaaaaaaagtgggattagcgttgttgtcagtgatactggcatgtgtaattatcttctgtggctattatatatatttggctctacattattatcgaattcctgataatcaaagattgaaaattaataacaatcagtctcagttattaaaagcggggcgtagctataaggcaacgacttataatgttggctttggtgcttataatcatgatttcgacttctttatggattcgggtcagttgaaggatggcaagaaactgcaggggcatcgagggacagcaatatctaaacaagcagttcttgattccactaatggtgtcattcaaacaatgaaaaagcagaaccctgacttcatgtttttccaagaaattgatactgattcaactcgtagctttcacgttaatcaggtgaaaaaggttgaagatgattttccaaaaatggattcaacttttgctagtaatttccactctgcttttttagcggttccattgaacaatcctcatggtactgtacgttcagggttgttgagtatgagcaaatataagatggatagtgccataagaagaaaatatcctgtttctagtgtgcctattgaaaaattcgtcgatttagatcgttgctttgtagttatgcgctttccagtaactaatggaaaagatttggtaatgatcaactcacatatgtctgcttatgataagggcggtaaaatgcgtaaggcacagatgaaactgatttcttctgtgatggaaaaagaatatcgacgaggtaactatgtcattgtcggcggcgactttaatcatgcgttagggaaagacatgatgactcattttgagcaccaagaagaaattcctagttgggtatccgttcttgatcaaaaaatgctgtctaaagattttactatgattaaggctcaaaatcgtgaaaacgttgcgactgttcgtgctacagacatgaaatatgatcctaaagttaattatatgaccatttgtgatggctttattgtgtcgaaaaacgtgcaagcaaaggtgtataacattaatactcattttgagtatgcagaccataatccggttaggttggagtttgaacttaagtagatttggacaaagtgaaaaacactggatcatgaaactgtagatttatgatttagtatttacgaaattaacttatgaggtaaaatctaatgaaaaaagaattatcatataaaggttattatagttcagtggagtattcattagaagatgatactctctacggtaaagttattggcatcaacggtcttttatcatatgaaggtcaatatggggtgaaataagatgagtaagattcaagagttcatcaagaaagatattgagagacatccagagttaaaaaagaatatgaacaagtaaaccttaatttagatgcttcagtattagttaaagatatgcgtgaaggtttggaaatgagtcaataagactaactgaagaatagttagtaaaataatgaaaagcattaaaattatatttgacttttaaaatgatttagactattattttaatcaacataaacattaattacttagcgatgataaggaaagtaaattgacggtccttctacagagaattatcagttggtgaaagataatgatcgacctacttttgaaaatggcctttgagcttgaagctacgaaatttttagtggcttctgggtccgccctctatagcggtaacgtatcgccagccggccgtacgcaattcaaggtggttttccataaaaataggtggtaccgcgttactgaacgccctattagatcaaaatgatctagtaaggcgtttttctttttaccgtttttagcaaaggagatttttatgagaataaataaaaaagttgtttcattcggattaatagctttaactacggcaaccttagctgcttgtggtaagcaatcagatagtaataccgtttcaaaaaagcaggttttaaattggtcagagatcacacagctttctacgcaggatccttctttggcaactgatactaccagttttcaagctcttcttaataccggggacggactataccgccttgataaaaacaataaaccgcaattatctctagctactaaggctaaaacttctaatggcgggaagacttatgatttttatcttagaaaaaccgcaaaatggtctaacggcgatccattaactgctaaggattttgtatattcttataagcgtactgttaatccagtaactaagtttcagatggcattctatctttaccagatcaaaaatgcgcaagcaattagtaagggccaaaagtctccggataccttgggtgtttctgctccttctaaatatcatttgagaattcaattaactagaccactgccttacttcaagattttattgtcgtggccattatttttcccgcaaaatcaaaaagtggtgcaaaaatatggcaagttatacggcacgcaagctaaatacacagtttcttcaggcccattcacgcttactagatggaatggtaacaacaagacttggactttaattaagaataagaattactgggatgctaaaaatgttaaattaaataaagttaatgaacaggttagcgaatcaactacgactagctataatctttttgaagcaggtaaggcagatgagactggacttactggtgagcaagttgccgcaaataagaataaagcaggctaccatgcacgtttgtcttcagcgattaaaagattggaacttaacgaaaataaggttccagcattcaagaatcttaaggtacgtcaggcattttctttagcaattaatcgcaaacaattagcaaataatgtcttaaaagacggttcaatcccagctaaaggcttcgttccatcaggtatgggcaataatcctaagacaggaacaccatttgaagatgatgcttacgttaagagtgcagtatcgtataatcttgctaaggctaagcaattacttcgcgaagggtataaagaatctaagactaactcaattaaaattaccttgttagtttctgatgacgatacttcaaagcaaacagctgaatttcttcaaagtaagctagatcaacttccaggtgttcaaatttctgttcaaacaattccatatactcaattgatttcacgtcaaacagctggtaattaccaagctacaattaaaaactggcaggctgtctttggcgacccaatcaacttcttggacgttttccaaaaaggatcaagttatttgaacaatggttggaataacaatcaatttaacaagctgttgaatgaatcagaaaacgtatatggcaatcaaccagtaaaacgctgggcaagattagtagaagccgagaaggtattgatgaaagaccaaggaactattccattagttcaagttgctaagccacaattattaaagactaccgtaaagggcgtttcctttaaccctacaggcgttccatacgattttaagaacgttagaattggatagaaaaatagccgttgattacttgtataaaaaacaagttttcaatggctttttttctgttttgtgctaatacctaaaaatatccagttagatttcaggcttaaattctaaaacacttgaacaaaacaaaaacgccttcaataacagaagacgttttctagagtgcgaagtattatgaattatccaattaatctcttcaccataattattatatcaggtatataaggttaattggttaatactatctatgaaatatagttaaatcagatataacaaacgataatcatatcaggctatttgttgtatgcatcgtatttttcatttaagacagaagtaatagttcgagtcattctatcgtgatatttattattctttaaaagtagcgtagtaattacgtctattacatacattattgaaaactgtgagttaataaaccgagcgtcgttaatataatttgtatcttgaacaccaactacaatatcagcaagctgagctaatgggctattgtcatagctagttaatgctacaactgtagctttattcttttttgctagttcaatggctcttaccaaggaatctgtgctacctgttgaagaaatagctataatcaggtcatcttttgaaatgatactgctagtcataaacatattattactttctgtttccgcaaacgcagatatacccattcttagtaatctttgagtagcttctaagctggtatatccagaagaaccgataccataaaaataaactctctttgcagatttgatgagttggattatcttttttaattgttttatatcaagtttattttgtgtttcagatagaactcgattgtaaaaatcatatacttggtgagcggtcgttttagagttatcttgattagtaatagtatttacttgtgaagaagctgcagcagcagccaatttgacttttaaatctgtaaaactagagcagttaactctacgtgcaaatctagtaatagtagcattactaacttttattgttgacgctaattgatttatatttgctgattgaataaactgtgggtcctgtaatataaataaagcaatttttctttcttgctgaggtaaatcgggtagcctattttgtaaatcagttaaaaacgtcatattgaaaaccttcttaatgtgttaaatcaaaaaaacagagaaagattttgtaatctttctccgcttaattatgctaaatttgtagttttttggcaaataagcaattacttattaaaatatttagcgtagatttcgtcagcgccttcaataactttatcagtgtatttagccattggttcacggttgtagccagcatgtacgcccatcttttgcaatactaacttaattgatgggtaaataccgttattaagaagggcagtgataatgtcgttcttcttgtgttctaattcttgtgccttagcaatgtctccgttgttgtaagcagcaatttcttctttaaccattcttgcattaacgttgtaggttgatccgatacagccatcgacaccttcaattaaagcaggtaacaacatttcatcgaatcctgaaagaataagcttatcagggaagcgctcacgaagtctttcaagtaagtagaagtctgcattagtgtacttaacaccgataatctttggatttgagaataatttagcaaagttatccaatgaaagtgaaacacctgttaatgcaggaattgagtaaatcaataactttgcatctacatccttaacgatttcatcgtagtaatgcttaatttcgtcgaaggtaaagttatagtagaaaggagtaactgcagaaattgtcttgtaacccaattcagtaacgaacttagctaattctttagcttcttttaagtttgggccacccacttgagcgatcaagtcaacttgttggtcaacttcgtcccaagcaatttcgaagatcttcttcttttcttctaagccaagcataaagttttcaccagttgaaccgccaacgtataacccgtcaacaccttcaacatcgatatcgtgacgaatgatttcacgagtacctttttcatcaatattaccatcttcatcaaatgaaaccattaaggctgcataaactttttgcatttgtttgacctccgtttagtcaaaataaaataatatttttttaattactgtataactaatggcaaattcaaccaacacctgcagtatagaacatgaaaacgctttacgcaactctaaattgcgaaaataattttcaaaaattgaacaaagcgtaggtgtatcaagagatacagagcacgaaaattattttctaaatttttatttgagaaaattgtttttaaatgatactatgaaagcgcttaatataagaacttgattatacaggaaggcgtgaaccaaatgagtaagaaatatttagcttttgatgttggcggaaccacgattaaatacggtattgtagatgagaatcttcagatttcagatagaggcaaagttgatacattacataataaggacggacatattttgaagtcacttattaaagttaccaaagagatgatacagaagtatcaattagatgggattggtgtgagtaccgccggtattgttggagacgatggaagcataatgtatgctggaccaactatttctgactatcaaggtactcccattaagaaagagctagagcggacatttaaaattcctgtcagtgtcgttaatgatgttagtgcggctttattaggggaaaaattagctggaagtgttaaaaatgctagtactatctattgtgttgcattaggaacaggaattggtggtgcattttgggcagatggacatttatttaatggatatcatcaaacgggtaattcaataggatatacattatttgatccaataacatcaactaactatgaacagcggtcatcaaccattgcattacaaaaagaattagaacccttaggtattgatcctattgaagcctttgcacgtgccaaaaaaggaagccttagagaaaagaaaattattgatgcttgggccttgcaagttgcagagggcttaagcagtgtattattacttcttgatccagaagtattagttattggtggtgctgtttccaagcagggagattatttaaaagatttgttggacgaaaaattgaatcagattttaccgccaaatctatgtaaaaccgtattaaagatggcttctttaggtaatgatgcacaactttatggaggtatttctagcatttttgaaaattaatttctagaaatcgcttgcaataaaattgttttcgtgtatgctagaggtgtattaactaatagcaaaattcaaccgtacttatgtgaggcaaatgctgagcataattgtacggtttttttaatcccgtttattgaagaaaagaggcaagtcatgaaagtttcagtgaatgcggcaatctttgttgatcgtttgaatagcggagagagtcaaattgattgcttagaggatgtttcaaatttgaaagataaaattgacaatatccaagttcgtggagaattctttaaagaaaacaccaaagacgacgaactcgaagcaatcaaagcattgtgtaaaaagaacagttggggattgtattattcagttcctgaacaatttttcattgatggacatgtcaataacagtttgaaagacaatgttgaaatggcaaaaaagcatcaattgaagcatttgaagtatttcgtaggtgacgttaaagatgttgaccaaaaggaaattgaggatgctgcgaagcttcttgaagatgctaacgttgatttgacattggaaaatctttctaatgaaacaggctatttaagtactgttcttaaaggtcttgaagcagtaaatcaatatcctaatattggcttcacttatgatgcaggtaattggtactgggttggtgaaaatcctgaagttgcctttaaagaattaaaagataaggttactaactatcatctaaaggatattaagaataaaaaaactgtgatgttaggtgaaggaactacagattgggaaccaatgattttaggacttgatcctcaaattccaatcttcctagaatatggcattgatgataacaagattgaacaagaacttgacaaggtcaatgctgttatagacatgcggtaggtgactttgatgacgtaccttgtacaactatttttgattctgctattaactaaaattgcggcacacttttcagttaaggcaaaaatgccaagtgtaattggagaattattagtcgggattttagttggatcagctattttaaattggattcagcccaccacattcattaattatttttctcaattaggtgtaatcgttttgatgttcattgctggcctagaaggagatttgaaattattaattaaatattgggctccagctttaactgtagctactttaggagtaatttttccaactggtacagcatatcttctgtgccatacggcttttggattttcagtaaaagcatctatatttatgggcttagttttaagcgcaacatctgtaagtattacggttcaagttctaaaagaaatgaatcgtttaaatactcgtgaaggtgcaattatctgtggtgctgctgttgctgatgatattatctgtgtcattttattaggaatttgctccagtatctacggtggtggtcaccatacatcaatcattaaaatgatcattccgatggtattattctttatcattgttttgcttattggtaagtatgttgtgccaaaattcttagatatttttagtgatcttaatgcttctgaaagtgatacagctggtgcgatgattctttgttttggtgcagctgccttagcagttgcaatgggaatgagcgatgttttaggcgcatattttgctggtttagcaatttcagaaactaattatgcagacagattatcaacaaaaattgagccaattggttatgcagttttcattcctgtgttctttgtaagtattggcttacagattagttttaatggcatgggtaaggacttattgtttattgccttactaataattatagccatcttgggtaaacaaattggttgtggtatcggagcaaagatgttccatcttaattggacagaagcaaatattgttggtgcaggtatggtttcaagaggagagatggcactagttgttgctaatgtagctcttcaatcacaattaatagatcaaaatcactatactgcaatgattgttgtcacagtaatcacaacattgattgcgcctattatattgaaacttttcataatgcgaacacaaagaaaagaagtaaaaatgaattaaataaaaggggagaaaaattatgtcgaaaacaggattcggtatgtggaactggatcgtcttaatcgcatatttgctagcgatgttaggcgttggtgcttactttactaaacgggcaagtaaaagtacagattctttcttcaaagctgaaggtaaggtgcctgcttgggctgcaggatttagtatttgggctactactttaagtgcgatcacgttcatgtcaacaccagaacaagcttttttaactgactggggttattcgattgggacgttaacaatttatttaattattcctatattaattaaatggtatgtacctttcttcagaaaattacaggttactactgcttatgaatatctggaaaagcgttttggaccagtgatgcggtcactcggaagtttgctatttatgctttatcacattggtagagtagccattgttatttacttaccaattttggctattacttccgtttcaaatattaatccaatattgattgctgttttagttggtgcaatgtgtattatttatgcattcctcggcggtattgaaggtgttatttggacagatgttattcaaggtttccttctccttggtggtgctttattaatttgtattttagcagtcgtatatactggtggacctgggaagatcgcacaagttgctgtagataattctaaattcttatctgctaaagattggaatcctaacaatttagctatgttcattccagtaatctttgctggtcaattcttcaatagtatgtatcaatataccgctagtcaagatgttgttcagcgttatcagactactccaagtattaaagcaactgccaagtcactttggacaaacggttggttagcaattgtaactatttttgtattctttggtatgggtactttcttgtattgttattaccacacgatgggaagtttaccaaaaggttttaacactagtgctattgttccatactttgtaattaccaagattccagcaggtttagccggtttaattattgcaggtatcttcgctgctgctcagtcaactattgcttcaagtttgaatgctatttcttcatgtttcgtaactgacttcaagcaaagatattttgataagaaatggaagatgaatgatgttacactagctcgtatcattattgtcatcgccggtgtatttagtttaggaattgctatttacttgttgatgggtaatgcatctcaaacttggaatatcttcctttcaattactggtttgtttggtgttccagttgctggtatttttgctgctggtatctttactaagtcagccaaccgtgttagtgctgtctggggcgtattaattagtgctgctcttacttattggtgtcaagtaatgggtgttgcaacattggtacaaccaattgtagccttcattagttcattcgtaattgcttggttaattggtttggttactccaaaatatgcacatgatatcacaggtttaactgctaaaactatcaatgagaaggttaaggattagttgaaaaaggtgaaactataatgaaagattcaatgtccttaaaagatatggagtcatatcgaggtagattagaagttccagatgattttgatagtttttggagcaaagaaatcaaaaagatagaagcaaagccatttaaattaattaaaagaaattttggcgataatattaaaaacgttgttttttatgatttgttcttcaaaggtactgataacggaatagttcatgctaaatgcatttttccagcacatgaaaaaaatattccagtagttttctatttccatggttacatgggacaagctctcgattgggttgatttcatgcaatatgctgcgataggtgtaggcgttgttgcaatggatgttagaggccaacaagggcagtcggttgataacggtacttatgctggaaataccgttttaggccacataattcgtggagcagtggatggaccagatcatctgttttataaaaatgtatatctagatgtatacacgttaattgaaacagtcgcggatatgtcacgtgtagacaaggaacatctatattcttggggtggatctcaaggtggtgctttatctttgattgctgcggcattaaatccacgtattaaaaaatgtgctactcaatacccgtttctttctgatttcaagcatgtactagaaatgggtgatcgaggattgccatatatgatgagttatttaggtattttaagttttatgatccatttcataagacggaagacaagttgatgcgtactctgtcttatatcgatgttaaaaactttgctcatagaataaagtgtccagttttaatgtttacaggacttgaagatgatacttgttttccagcaacgcagtttgcaattttcaataggatagaaagccctaaaaaacacatgctgttaccagaatatggtcatgaagcaatgttttattatgttgatagtgccgcatttaactggctatttgatactaagttcccagaaaatccaccggacactagtagtaatgctttagaataaggtaaatttttaggagataaaaatgaaaaaagaagagtttattcaaaaagttcataatggattaattatttcttgtcaggctttacctggcgagccactttacaccgaagagggtggcataatgcctctgatggctaaagccgctaaagaagcgggtgcagttggtttgagagctaactccattagagatattaagcaaattaaggaagtagttcctgacctgccaatgattggtattattaagaaagaatatccacctgagaagccatttattaccgctactatgaaggaagtagatgaattagctaaaacagatgtcgaagtaattgcacttgattgtacattgcgcccacgtcatgatggtaaaactgttgcagaatttattgatgaaattaagactaaatatcctgaccgtttattaatggctgatacttctaactttgaagaagcaaagaatgcttatgatgctggtgttgactttgttggtaccactttgtcaggctacactgaagaaagtcctgtttcagatcatccagattatgatttagttaaagctttggttgatgctggaatgccagttattgctgaaggaaaaatccacagtccagaacaattaaagaaaatgattgatattggaccagccggaattgttattggtggtgcaattacaagaccattgcaaattgctaagacatttacgagtgtttttgaataaatgatcttctgattagttataaatttcccctctcccaaaacaagctacgtttgtaaaaggcagacgtagcttgtttatttttggttataaagtcgaatttttatagaaaaagcgaggtataaaatgtcatattttattcatgcaaagaagttttatttagatcatggtgttgaagaacgaggatacttagaaattcaagataatggacaatttggattttattattctgaagatgaaaaaccaaaaagtgctgcaattttagatttcaagaatttctcaatagctccagggtatgttgatacgcatattcatggattaatgaataatgatgttaacgactgtgattggaacgaaatcaataaaatttctgaaaaacttcttcaatatggtgtaacaagttggatgccgaccacagtaactacttcatctgagaaattagatgaaatttgtaaaacgtttgctgcacataaagggcaggaaaaaggcgcaaagatattaggtattcactttgaaggctcatacttcactaaagaacatggcggtgcagaaaatcctgagtttatggaggatccttcaattgaagaatttgataagtggtacagagattctgatgggatgctgagaaagatatcactagcaccagaacgaaaaaatgtcccacaatttgtcagacatatcgttaaaaaaggcgtagttgcttctttaggacatactagtgcaacatatgaagaagcacgaaaagcccttgacgcaggagctacaatgtttaatcatacgtttaatggtatgaacttattatctcagcatacacctaatattattggctgtgcattaacagctgacgatgtatttgatgaaatgatagctgatggtcaccatataaagccgatcattttgcagatgttgtttgatttaaagggacctaatcatattgtattaatgactgattgcttacgtactggtgggatgcctgatggtgaatatgtgcttagtggtatgaaagtaacagttaggaatcacattgcattgttagaaaatggtaaattagctggcagcacattgactttggataaagcagtaagaaacttagtaaattgggaagtatgtaagccatatgaggcaattaagatggcaacatatactcctgcacgtagtctaaatgaaaactgtggttgtatcctgccagatagggatgctgattttaatgtgctagatagtaatcttaatgttctaaagacttttgttaatgggaaagaaaagtatagcgtaaagtaaaaatattattatagtgtgaaaaaggcataggttgtgatatgaacctacgccttttcttatagttaatgtcttctttatctacttgaataatgattttctaacaggaaattgtaaagaattttattaaaatgatcaggaacttcagccatgatatcgtgaccgctgttagcaactaatgtagctttaacattatcgttttgttgagtcatccatgtggtaaagtcagaattataatatggacttttaattgctgcaactacaaagatcggcatagaggcattttgaaccacctttcgccagtctttagtagcgtgttcgcacaacaaatcaaaattgtcagttctgctaaatggatgagctaccttagcttcttttaaaccaggcattactctgacatctaatccgtgaagagtttcgtgaacattgggaacttttttagcttcttcaatataattgtctacagtataattcataaagccgtatttccaatcagttgtatttatcataaaaggtgtttgatcaattatgactgctaattgaacgatacttggttttaatctgattaaattatagagtacgctaccacccattgaatggcctataaaagccgcttttttaattcctagatgttcaactaactcaatcaaatcgtaagttaatcgatttaaagtgtgaccttttttagttcgctcgctacgaccgaaattacgatgatcgtaagtaataacctgatagccaagttcagaaaaataatctacttgtaatttcccaatctcttggtgaccaccaaatcctgtcacgaatataagaggtttaccattacctttcacatgatagttaattttaattccatcattagttagaaaattcatatcacttttctcctagtatagaaaacgagtaagtgacgtttaatgcatcattattcttgtatttgcttaatttataaaccaaaactaattttatatagccaaattcctagtattgctcctaaagttgtagcaactacaggaatccaactgtaatcccagtttgaatcccctttgtttggaataggtagaattgcgtgtacaattcttggacctaagtctctagcaggatttaatgcgggaccagtaggaccaccgccggccataactagtgcggtaataattagtccgataccaatgtttgcaatatcgatagattgtttaaagaacattccacgataaagtcccattgcgacaaatcctaaaatggcagtatcaatgaattcactgataaaaccgttgagcttattgtttaaggtttcaccagtggagaaacaagctaaaattgctccttcattattaggagtttctttaaagtacacccaataaatcgcaacaactagaagttgaccgacaatcgcaccaagcatttgagcaattatatattgaacaacgtgagcccaagggaaaattcgcatacggcttcacctatagtaatggctggattaatgtggttaccagaaatcgagccaaatagcatggcaggcaacataacaccaaatccaaaaccccaagcaatgaaattccaaccaccatttgattggccatcttttccattacctgtagtgccgtttaaaaatgaatttgctacagcaccattacctaaaattactaaaattgcagtaccaaaaaactctgcaatataacgagatatccatggtcccgacatatttcccactccttttaatataatgtcaacctgattatatgcagcttaagttagaaatgacaattctataaggcctagctaatagtaattgttattataactattaaataaagttatatggttaaaattccttgtaatgaaagcggtttacaaagggctataataaataattcacaatgatatttgacttattatattagatataaccaaaagtaatatggcgcttacacactacgaggacaagcgcttacatataattcacaaaaatatttgaaaataattgtaaatttgaattttgtgcacacttgaacaaaaattaatggcgatgagagcgaaagatgagtttgttttttgaaaggacaaaattatgagttttaataaatacgaaaatgttttgttagatgaagcagaagatggcattgctgttttaaccattaatcgtccaaaagctttaaatgccttgaacttagcaactttgcaagatattggtgatgctttaagagaagttaaagcaagagatgacattcgtgtcttaatcgttacaggttcaggcgctaagtcatttgtcgcaggtgctgacattaaggaaatgcaaaatgataatgtaactgaagctttgaagttatcaaaacttgctcactcattatttggcgaaattgaacatttgccacaattcgttatcgctgctgttaacggttatgctctaggtggtggctgtgaacttgcatgttcatgtgatatgagaattggttctacaaaggctaaggttggtcaaccagaaactggcttgggtattatccctggatttggtggtactcaaagattaactcgtgttgtaggtagaggtaaggctaaggaattaattgctacctgcgacatgattgatgctaaggaagcatatagaatcggtttattcgatgaaattgcagaacctgatgaattgatggacaaagctatggaaatcgctcataagattatgaagaatgccccattatcagtagctcgtgctaagtactcagttgatagaggtgcagatttaccacttgatattgctatcgatcttgagagccaaatttgggctgaaatgtttggtactgcagaccaaaaagaaggtatggcaggattcgttgaaaagagagaaaagaactttactggcaagtaattgaaaaattaatgtgttttgtttagttgatactaggagataaattatgaatagagtcacagaattattaggtattaaatatccagttgtacaaggtgctatgcaagaagtagctactgctgatttagcagccgctgtttccaacggtggtggtttaggtattatcgctgctggaggcaagactccagatgaattaagagagcaaattcaaaaggccacgaagttaactgacaagccatttgccgttaacttgatgctgatggacaagaatacaccagagcacgttaaagtaattattgatgaaggtgtaaagattgttactactggtgccggcacaccaaaaccatatatgtctgatttaaaagctgctggaattaaggtaatgccggttattcctaatgttaagattgccaagaaaatggaagaaatgggtgctgatgcagttatcgttgaaggtatggaagccggcggtcacattggtggaactacttcaatggtattatggccacaaattgctgatgcaattaatattccattaatcgctgctggcggtatcggtgacggtcgtggtgttgttgaagcatttgttgctggtgctgaaggtgtacaatgtggtactattttctcaattgctaaggaaagccctgtaggtgataactggcgtaaggctgttattgacgctactgatactggtactgctgttgttggttctactattaagggtggtgctactcgtggtattgctaatgaagaagcaggtaagttgtttgaacttgaaaagacaggtgtatcaagagatgaatttaattcagcattgaacaagggactatacgttggtgtaagagaagatgaccctgataagagtttctttatggctggtgaagttgctggtctaattaaagaatctaagcctgctgcagaaattgttaaagatttaatggatgatgctcaaaaagtattgaataaaaacatcgaaatcatgtaatttaaagccattttatggctgtggaattaatacataaaatatttataatcaagcattaaataaaggcgaatgtaatttcgccttttttattattattataagttataaccaatagttatgataatgctaaaaattaatgatttcacaatgctagatgtaagcggtaccttataagtgtcaaggaattaaatgattccaaaattctactaatttgaaacatactctcatacatattattaaactcatctggtttccaattcagtagaaacgtagttagttagatttaaacataggaggataaatctatgtctgttaaagttattgacagtaaaactgcagcagaattggtcccagataacgctagtgtagctcttgatggctgccttggcactgatgtcgctgaagaaattcttgaaatgatgaaaaatagataccaagaaactggacatccaaaggatttggatgtttggtatggatgtggtatcggtgataacaaaggctcagccgttgaaaactttgctgaaaaaggaatgctccgtcgagtagttggtgggcttgggtcattagcgccaaagcttgcaccaatggttgcggataatgattttgaagcctttaatttcccacaaggtacaatttcacaattgtttagagatgcagctgctcaccgtccagttctagtaactcatactggattaggaactttcgttgacccagaaaatgatggtggtcgtttaaatgaagctgcaaagaattctactttggtaaatagaattaagattcatggaaaagattaattagcttatgaaacaccaaagccagatgtatcaattttccgtggtacttatgctgatgaaaacggcaatatcacatttgatgatgagcctttaaccatggctgttactgctgttgctatggcagctcacaacaatggtggtaaggtaattgttcaagttaagcgtgttgttaaggctggtagtcttgatccaaaggccgtcagagttcctggcgttttagttgattatgtagttccgactgataatcctgaaatgactaaacagactaccgattacatttacaatccagatattattaagtctaatattgtaaaagacgttaagcaaatggacttacctcttgataaaaagaaggttattgctagaagagctgcattcttattcaatcctgataccgaccattgtgtaaacttcggtattggtcaatatccaatgtattgcgcaatggttatgaaagaggaaggattatctgacaatatcgtaactactgttgaagcaggtacattcggtggcacttcattaggtggtggtagttttggtacagctattgctcctcaagctactattgatgaaccttacatgttcgatttctacaacggtggtggacttgacgcaacttacttaggtttagctgaagctgaccaatatggtaacttaaatgtttcaaaatttggtcctaagattgccggtactggtggtttcgttgatattactcaatatacacctaagattgtcttcactggtacgttcactgcagctggacttaaggaagaaatcaaggacggtaagttaaacattatccaagaaggtaaagtaaagaaatttgtaaagcatgttcaacaaattaccttctcaggtaaagtcgcatatgacagtaatcaagaagtttggtatgtaactgaaagagccgtatttaagctagttaaaggcggtattgaattactggaaattgcgccaggcattgatttacaaaaagatattcttgatcaaatggaatttaagccaattattagtgacaatttgcaggagatggatccgagaatttttcaagagccagtcatgaatatcaaaaacgataagaaatagttaagtgttttaattcatagggggatgcaaagttggatattaaccaaatccgttatttgctcacaatagcagataatgactttaacttaactcgtagtgctgaagtcctccatatttctcaacccgctattagtaaagcgattaaagatatggaatttaagcaacaagtaaaaatctttaatcggcgaaagggtaaaatcgttggattgacacgttacggtataactttagttaaggaatctaaaaaagtgtatgaacaatatattgaaatggtttcgaaactaaatgaattatcagaaaatagtaacggaactgttagattaggtattgcaccagttattatatcgaccgtgttcaatgatgcgttaatagcctttattaaccaaaatccaggcattcaactaaaaattatcgagcgtggagcttatgaattacaaaggatgttgattttaggtgatattgatctagctgtgattgtttctccagcgactgttgaaggtatttatgaggatttaatatacgaaaatacagttagggtttggtttaataaagaacatcgttttaatgattttactggtccgattccattctctgaaatagaaaaagaaaagattgttactctgacagatgattttatggttacctttcaattgaacaaaagatttaaaggtgataggctgaaacctaattattttcttcaaacacaatcatgggatttgattttaaatttagttcaacgtgataagaatttaattggtattgtggctgctccaataggaaagaattatagtgatcatgcaataaagaatgctgaaattacacctgaatttccttggaagatatcgatttgtcatactatgaattccactgaagatccaacagtagaatacgctaaaaattggtttttgaaatacttttctaaatataaaaagatatcaattgattaaaaattaaggaagaatcattatgaaagctatatttccaggtagctttgatccaataactaatggtcacttagatatcattagtcgtgcttcaaaattatttgataagttagtcgttgttgtttcaaataatacctccaaaaatggtatgttttctcctcaacaaagatatcaatttgttaaagacgctgtgtctgtttatcctaatgtttccgtgagccttgttcaaagtgatttaactgttaatttggttcatgaattaaatgctgatgttattgttcgtgatgtgagaaataatgaggactttgtttatgaacaacaaatagcattaatgactaagaaaatggaccccaatatagaaactttgattctattttcaaaccctgaatgttcatacatatcttctagtattgtaagagaaattatgctatttggaggcgatatttcagatgctgttcctgcttgtgtaaatcgtgctctaataagaatgaaaaatcaacatatggcaaggagcgtatcattatgaagactagaaaagaaattaccaatttaacgatcacagctgtatttattgcattgctttttatccagacatttgttccgaatgttgggtatgtaagaattcttcctagtcttcctgcaattactactattccattaaccattgctgtttatgggactttaatgggaccgaaatggggattgggttttggattagtttggggaattactcgtttagttgtggcctatacacaaccaggggatatggtcagcttgcttttgttccaaaatccagtaatctctcttgttcctagtgttctagcaggattctttcctggattaattagtcagaagtttaaagatagggatgcacatattcaaaagatagggtatatgctcagtggagcagttgcttcgctgacgaacactattcttgtaattttacttaccgatttaatgtttatgtctaattcaagcaccttaacaagttacttagggcatttttgtcagtcaactccattgttggtaattctagtcactgctctaggtttcaacggcttggtagaagcgatatttaatgcaattcttgtccctataattgttacacctcttaatttggtacttaaaagagcgtaaatgatgaataattttattactgttgaccgtaatcactggactaaattaaactctaagattgagcttccttcttatgaactattaaaaagttttattgatcaaaataagttacaggttacagtcaatgaactttaagaagtatatatcctattagttcaatatatattgatttgcgttcaaaataagaaaatgttctctaaattaaagacaaattacattaagagtgctgatttaaaccagccatttatcctgggaattactggatcagttgctgcaggaaagtcaacgactgctaaagtaatagagactcttattagtcaattttactctgatttagatgttcaatcattgacgactgatggctttatttatcccaacaaagtactggagcaaaagaatttaatgtcacgcaaaggctttcctgaaagttacaatgtatcactattaaatgattttctttctcaagtaagtgatggggtagaggaagtttcctatcctgtatactcacatgagctttcagacatagttcctggtaaatatcgtagcattaccaatccagatattttgattttagaaggaatcgatattttgcaaattcctgaaaatgaagagaagattatcagtgattatatagatctatccatctatattgatgccagtgaaaacttattagaggaatggttcttaactcgctttaaatgtttgctagatattaataaagataatcctaataatttcttttatcattgggctcatattcctttagatgaatcaattgattatgcaaaaaaggtttggcggacagttaatttagttaatctacgtgactatattgtaccaaccaaggaaagggctaatatcattctttataaagatgtaggtcacagagtaacatcaataaaaattcgaaaatattagaagtatctctttctaagcagttcatgagaaatcatggactgcttttggttgtgtgtcgggcatggcatttgtctagtctagtgaaagtctagatcacgggtagttgtcgccaagtgtagcgaaccacaagccgttagcggtgacgctatgggtgaaggaagtggctagcgagttttccgagcctacgtacagaaacctggtcaggccaaatggtggatgagactgcagcacaagttaaagtccaaaggacaaccgtaaaaccaagacggtaaaccagggggcagtggaaaattaaagatgaatgtcttaccccgagagatctcgtggacaggtgaaaccgagtaagctttaatatcagcgatcgtaagcctggtcgaaaaaggttaatcgcgagaagtcagctgaggtcgtagtagtgctgaaggttttgtaatgaaactggagcgaagggcctaatgtttgtaagagcatatctcgctataagcaatgttcagacagtccggataagaggatagcctagcacaaagagaacgtaactctttgatggtgaaagcaattgggacaattctgaataaatttacaagtagaaatggagatatcacgagatggaactaattgaacagattttaagtcaaaataatctcaaggaagcaatcaggagagtcaaaatcaataagggagcgcctggtgtagacaggagaacagttgatgagcttgatagctattttaaaaagcatcaagtagaaataaaggacgccatcatgaagatgaagtatcgtccgcaagctgttcgcagagtctacattcctaaagctaatggtaagaaacgtcctttaggaatacccacggttgttgaccgagtaatccagcaggctattgcccaagtattaatgaagatctatgatcctcattttagtgagcatagctatggctttagacctggacgcagtgctcatgacgctattgaacaagtcttggaatatttaaacgaaggctatcaatgggttgttgacctggatattgagaaatactttgacacggtaaatcatgataaattaatttcaataattagagagcaagtaaatgacaaaaccaccctccatttaattcgagcctttcttaaagctggagtaatggaagatggttgggttaagcctaataaactaggtgtaccacaaggcggccctctttcaccaattctatccaatatctatttagataaaatggataaagaattggaacaaagaggcctgcgctttgtccgctatgccgatgactgcaatatctttgtcaaaagcggtaaatcagccaaacgtgtgatgaattcaatttcatcatggctagaaagaaagctattcctaaaggtcaacgcaaccaaaaccaaagttgtacgaccaaccaagagcaactttcttggctttaccttctggaaaagtggcgaatactggcaagcaaagccaggagatgaccgcaaaatcaagctttatgacaagatgagagaacttctctgtcgcagaaaagcagctgctcagcctctatcactagtctttactaagataaatcaagtagttagaggctgggtcaattactttagagttggcgacatgaaatattttctaattaagttcagtcaatggctgcgtcataaagtacgggtggtaatcattaaacaatggaaactaccaaaacgaatatacattaacttaatgcggattaacaaggcactaaagtgcaattttagtgatgaagatattcataaagtagctaatacgcgcttaggttggtataaaagaagtacgggttatgtcattaactttctgcttagcccaaaagtattgggcataagcaaagcggatcgcccaggcttggtcgatccgctagaatattatttatctcgtaaataatcacaaacgtagcgccggatacggaaccgtacgtccggtgcaatgagaggggcgagttataaaactccctctactctattgatttaagttagtgacagtatcattaagttaagacattgacaaatttgacgcttttggaaccgaatcattttgattcggttctttttctttttacaataaaataaagagtgagcagaagtctatatctgcttactcttttgtctcttatcaatttttttataaaaagagcgtagttctcatgaaatcccttcacacaaacattttaaaactgatgaatcagattatcgataaaattcaaaattcattattgacaaaacaataaaataagattagcataatattaaaattatttaagaaaggagctacatatcatgttagaatcacaaaattcagcaacagtagaattacgacgccgccaccaaaatgatggtttattttgtgatcctaaattatggtgtgcggcgaattttgtttaaaaataattaattaagttgattactaagcaaggttcacattcctaattgggatgtggacctttttttgttacagaaaagagaaaaaactatgaagtcaattaaattatttggttcaactggtctacttattggtgctgctttaactttagtagcatgtggtcaaagcaatacaaatgcagcaaaaagtgcaaagaaatttcctgaacaaactgtacaaaaaactgcacagaaaggtggcactttaaactacgcaatcgaaacagatacgccttttaaaggtatttttgatagtcaattatcagttgatcaagttgattctgatgtcatgcaatttggtaatgaggggttattcgatactgataattcatatcaaatacgcgtggtgctagttaaatcgttttagttaataaaaaagtccaatcggattagactcaagttgtaagtaaattaaatagaaaagagtctgatctaattgaactacctcaagcttaatcgtttctctcaccatttacaagttagttttagtcgtttaaatgtaatttgtcgttcactatataatctttatgcgcctgataagcttacgcatcgaaaaaacattgatcaaacaaagctttccgacagctccatcttagcgatgctcatttggcaaactgaaattggaattgaatcccaaagaagattctgtaaattttttgttggcttatctcattctcgctttaatcgtcgagccaagatgcttttgcctttaattcgctgcatccgtcaagcttggaatcaagaggtaaaggttgctggagaatttttaattattgacagttttcctgttccagtttgtcagcctgttcgtaattatcgtgttaagatcttccgtgacatagccgatattggctataaagcaaccaagaaagtctattattatggtttcaaggtgcacgcgctagtaagcgatgaaggctatttgcttgactacgcagtcactaaagcatcagtgcatgatgccaaagaaacagtagaattgatgattaatgctcatccaattaaccattatcttttaggcgatgaaggctacttaggaaaagacttagctgccgagttaaaaggtatgggctatgtcctttggacaccatatcgaaaaaacatgaaaggtgctaaaaaacataataatcatcaactgatggcaattagaagaacaattgaaagcgacttttctttgctcagttactataacgctgaaaataaccgagcaaggagcttagctggctttcagcagcggctagaaatagccattttagcttataatatggcatattgcctagaacgatttaactagcaccacgcgtatatcaaattaataataaaggacctgctacttttaaacttgataaaaatgcaaagacaattactattacggtaaaaaaaggtgttaaatggtcggatggtaagcaagttgtagctaaagacttagaatatccatatgaaatgactgccaacaaagcaactaatagtttacggtattcagattctttagaaaatattgttggtatgaaagcttatcacaatggaaaagcaaaaactatttctggtattcaatttcctaatggtgaaaatggcagaaccattgtcattcattttctttcaatgaagcctggtatgttgcaatcaggtaatgattactttattgaaactgctgctccgtatcattatctaaagaatattcctttcagtaaattggtttcatcagatcaaattagaaaaaatcctatcttttttggcccttataaagttagcaaggtagttagaggacaatctgtaacttaggttccaaataaatattactggagaggtacaccaaaattaagcaaaattgttgctcaggtagtttctactaattccgcatcccaagctattaagagtcataagtttgatatagccgatgtggtaaattcacaatggcaagcagttaaagatgcgaaagatacaaaattcattgctaaaattcctcttgcttacagctatctcggcttcaaagtgggtaaatggcaagatggtaagaatgttatgaatcctaattctaagatgaatagcaaatctttacggcaagcaattgcttatgcaatgaatattaatcaagttgaaaagagatacacgcaaggtttgacttttagagtgccaaccttaattcctgaacaatttggtgattactttgataaaaattctaaaggctatccttacaacttaaagaaagcaagtgaattgttagataaggcgggatataagaagaaaggcaaatggagagttcaacctaacggaaaaccattgagcattcatttagcagctatgagtgggtccgccgttcaagaaccaattattcaaaactacatccaacaatggagaaagattggacttcatgtgagtttaactggaaacagattaatggaattcaattctttctatgataagttagaccaagacgataaaaatatagacatgtttattgcttcctggtcattgtctattgaaccatcacctagaggaatctatagtgaaactagtgcaatgaatgactcaagatttgtgacaaaagagaacaacaaattactcaatgaaattgattcgtctaaggcgtttaatcatgcatatcgggttaaggcctttcataagtggcagcaatatatgaatgatgaagcttatattgtgccaatgactaattcttactccattaaggctgtgaatagcaagctggttaactattcacttaaaccggctgaatcaaattcgatttggtataaggtgggatttgctaaataatctttcttaagaaaaattcccttccagatgattgaaaacgatcaagattttcttttttgagaatcttggtagttttttatgatttgtaattttataaatgattaggcagtttgaagtctatatgtgtatatttaaattgtataaaatctccttaaatgctgatataacaaggattatttaatatagctttttagcctaatgaagataactatggttatatttatataatatattatatattttagagcagaagtaaaaaaattcgaaattgtttattaattatctgaaaattgaaagcaccaaaatcaagctcaagtcctgtcactattgagctttcttagacgtaattagtttttatatgatctgtttcagtgcaatttgtatgaatcgtggcagttggttaataaagtcattgattacttcatctatcttttcaaaactattctgtttaagctcttttaattctgaaattaagtagaccaatgcatctacgaatctaatatcaggtaaggattcgttcattagatagaataaatctccgattgtcttatcatctgtattttgtctttcctgccaggtcaatagatcataagttattgctgtaactgcgatatagccacattggccatcatagctttgaacttgagatttatctaaagcaagatattgcttagacgtcttaaaatatgtttcaatttgccatctacgaccataaagttggatgatttcttcagggctaagctttgtctgagtagtagctaaaactaaatacttgttcttgtttccacggttggagacaaagacgagctttaataaaaagctatgtccatgatattgagcctcaactatgcttgaataaagataatgtttctttttacggatgtttgaagcagccaaacgatcatacaagtctttaacgctatagcggcgatggcgataaatgtaataaatctttgaactcttcttgatcatgccaagtccatctaaaccgatcttctttaaaatccaaaacattcttggagaagaaaaccaagaatcgaataagacgtatttagcttctactcctaatcgtaaggcttgtctaatcaactctacagttacatcattcatctttctctgagcttgatttctccttttaccagaaattgaacgttcatcagcagtaatgggagcagctccaatcatatttttcttggttttggttgacatcaaggcaaagttaaccggcaagaaggtattgccatcgctccagcctaaagttaaaccacgatatccgttcaaatactcatgcttgtcatggtcatagactttagctagcaattcggtctttttagaaaaagaccgagccatcagcgtatcgtcaacgataaaagcaagtcggcgtcttttatcgataaatggttttaagcagccaatgagccgggctgcaatcaagcataatagtttttgcagttgattcttccatcgttaagtacattgcgagcagttctaacggaaaaacgtttgtcatccttagctctgaataaagaaagccgagcaaaatgtactgacatcagccaagagataatcatggttaatgaaacggtggatttacgcttaaaattgacttgtttagttaacttagctagaccaattagattaataaatgaagaaattaaggatttagtatcgttttctgtgtcgatttgttctatactgttcattgcgcaggatctcctttactttttaggtcgacacttaaagtataacgcagagagatcctgcgtttttatttttgataagaaaaagccaagaggcgcggggaaagagcgttaatcttagctttcaagtttcagttaattatatagaaatggttatttaatttgcttaacctaatgctatcgcatttgaaagagctttcaatatcttttaagatgttatctaggtttgttattaaatatttacgcatatagacttctttatttaacctgctaccctattaagtgaagagacttataacgaagtttaagaaaccgactacttcttaaataaatgagtttaaatttaaagcttgaaaataatgaggacttaaaaatttcgagctttcataaataataaataggggattaggaaaatgaaaaagagcattaaacttttatcaacaattagcattgccgttgctttagcaggtggtgcaattactgcagttaacaatcaagaaacttcaaatgttgatgctgcatcaataacattaccctctggttacaccaaggatgccgttatcaaatggaaccaaactggtaaggccagcaaggctttggtaaatgcctcaattaagggtatgaaagaaaataatgatagtgatgctggttcagacaacaccttggttaatgtaactaagttaactgatagtcaaaaagttgaattaagcaactacactttggaattgattaattctgctcgtaatcaacttggcaagcaatctgggacttacaagcgcggtgcattaaattttgctgaccgtgtagctaatcaatattactcaaacaacaagtcttgctgggatcctgatcactatgttactggtattgaacgtgcagccaaggcttcaggtcttaactcacgtgttggtcaagtttacgaagatgaagcaggtttgccaatttcttcagaatttaacaccaactaccgtacaatgtcggctttgaagagccaaatctacttcaacgttaagcagatgctcttcggtggctttgctggctcaagtagccaaatgggcgatgcttctaagtatactgaatgggaacacgctggcgacttgcttggctgccgcactaagcgctacatccaaaactacaagaaattcaataattaatctgacgttgtagtttgaaactaaaaaagtttcctaatccaagagttcaaacggtttagtcacctgtctgggctctttttaatttgcttaagaatattttgaataatatgattaaatttctattatgtgagattttttcaaaatgtggttgactgtaaacaacaaatagtaaagaatacagttaatgaaaagcgaggaagaacttcataagttagtggaaaaggttattgatgattttgctgcttgggatgaagatgagcgctataaggagccagaaaaagaactacgtcagctgttggaagatagtaaggtcttgggctttataatgtacactagattgagtgatattctgggttggcatcatcgtatgttgactgaagccaaggaagagagaaccttaacagctaaggaggaagtattactgaatgacatggatgcagttcatgatttgatggaacgaaccatggatgaagagaatggtaggttgtagaaagcattaaaattacagaaaaataaaaccacattgctcaaaaattgaagtgagtaatgtggttttttacgttgtaattattgtagtagccaatcaataagattgattttttgaatcccgtcgtagttggctgtgggattgatagtatcaagggttagtaaaagtttggaatgaactccaaacaaatgacatttattgctgctttttggagtcaactccaaaaagctgactttatcgttttgatggaattgaataggggcaagggagatattgtaaaagcgagtgtcgagtaaatagtgaactgagacctaaaagttagacacttttaggtctttttctacgtaaagtcaagcataataagaagtttgacttcattttttgtttaaatttcaacttaaacatcttttagtgtcgatttatttttttagttagacacgacaaataagcccagatccatatctgatttttgggcttagcgttataatgtacttgatcaattaattacgactaaagtctttttgattatgtgtggctacgttgtaatcatatggttgatcattgataatcagggcataaatggttctgattagtttatgaattgaagcaatagctatctttttgaaccctttggtttgagaggatagctttttgctttcataataatctgctatatgacacggatttgtcttagctgcattatcaatttgtccaatagctcgataaagcaacttacgtgcgactgcattgccatgtttagtaatacttaaattagagtccatttctcctgactgatatctgcctggatcaattccgataaaagcattgattttattaggattactaaatctgcgtaaatctcctaactctgctaaaactctgacagcagtggtctgtgcaaagcctggaatgctttctaggttttctaaatcatgattaggcaaagacttcgctaacttaaccattcttgcgattaaattttctctttgatcacttaaattaagcaatctgtgtgcataatactgcacttgctcgacttctatgctagagcaagatacaactggataagcttgataagctaattcaattaatttatctgcagtccttagagcgtgtttaaaagcaatcccctttaagctcattaaccagttaataagctgttttttatcttctcttcttactaagtcacaatgaggatatcgcacaactatttgccagtaatttttacctttagcagaagaaaatagattttcaatttcaggaaaagtcgattgtagagcttggtaaagtcgatttttagccattactaagtcagctgttaactggtcatagaagcggctcaaagcattaagctgcttataagtttgagattgaagttgattaattggatgatgatatagtctttgaattaaggctaaatgataagcatcagttttatcagtcttattatgacgtagtcccatatccatttcttttttagctttaagaggattaagaattacataatcatagccatagtcttccagaaaagattgcagtgtacgtgaataaacaccggtagcttcaaaaataatttgcggatgtttagaaaaagcggttaattcatgaagcaattgaataaaaccaggacgattattagtaatggttagttcatttttgctttcaccaattagttcacaaacagtagaagtagacttgcttacatcaattccaaaagtaacttgcataataaaaacctccaaaacttagtagtaaaacgtatttacttaagaaatcagatctaattttctaaactcgacatctagtgtccacattcttcgaagagactattgaaaacttaagtaaaactgccagtttattatgcgacatcaagtgtctaaagacctcagggcatatcgttttactactactttaattctacaaaagaataaaaatagtgaatcaattatcccgtcggataactaattcactgagactgtaaaatagtttgtgtaaggatgaatgattccttaaatttatttctttaaacattagaaaaaggagttcctttctcgtatgattggtttgaacaaaaaaacacatacagaaagaagaactccttcatgaatgattttaccaaagattttgctcaagctctattcaatccagacaaaataaatgatttattgcgcaaagagctacaacaggctgttaataacttgttagaagctgaattgactgcctttctgggctatgatccctatgccagaaatggctggaatactggcaactctagaaatggtgcttatttccgcaaagttgatacgcaatttggcccaattgaagtgcaagtgcctcgggatcgcaacggtcaatttcatcagcacacgctgcctggctacaagcagcactcggatatcttggaaagcatgattatcaagctttactccaagggcgtgaccaccagggaaatagccgatctaattgaaaagatgtatggcagccattacagtccagctcaggtatcaaatatttccaagcagatgattccaaaggttgaggcttaccacaaacgcaagctaagcgacaagtttttctgcgtctatttggatgcgacataccttcctttgcgccgagaaacatttgagcgtgaagcagtctatattgccattggcatcaagcctaatgggcacaaggaggtcattgactactgcattgcacctagcgagaacattgaagtctggacagatatgcttcaaaacatgaaatcccgaggcttaaagcaagttgagctttttctttctgatggtgttgttggcatgaaaacagccttggccaggacttatcctaaagctcattttcaacgctgtttggttcatgtcatgcgcaatatctgcgctaaagtacgcgtcgacgatcgtgaaaagatcatgaacgaattcaaacaggtgcatcaacagacaaacaaagaagaagccacagctgtcctgcatgacttctataccaaatggggcaaggtttacagccatgttatcagaagcttgaaagacatagaaccagatctgctggtcttttataactatcccaagcagatcagagcttcaatttattcgactaacatgattgaatcatttaacaatgtgatcaagcgcaaagctaagcctaaggcagagtttccaactgaacagtcgcttgatgcttttattggcattcaggcaatgagctacaatgaccgttatttcaatcgaattcataaaggctttggtcaggttcaggacaccttagaatcctactttgattaaataaataattaaaaaatcaatttacgagaaagatctatttacacaaaagatttgacagtttcaattcactatttagcttagaatgtttactatgtctaaatttaataaagaacaaaaaatagaaatttatcataaatggaaagatgaaaatatctcaatcagtcaattggctaaagcgtacagaatgaatctagctaatttagactatatgcttagattaattgatatgcatggaatagaaattttaactactaaaaaccaaagctattccaaagagtttaagcagcgaactattgaacaagcaatctttggcaataaaccatacttacagctgcctttggaactggggtttaaaagtattggcatgcttaacaattggattagagaatataagaaaaacgggtataatgtcattatcaaacagaaaggacgccctgcccgtgaccaaagaaaagcagaaatctcgcaaggaactggagaaagagatccagcagctgaaagaagaaaacttgcgattgcgtattgtgaacgaatacgtaaaaaaactaagtgccttggatcaagaagatcagaagaaatagctagggtgattacggatctaaggcaagaattcaaagttagtttaaattatgtattagctgcgattgcagagcaccctgagctacctataattgccagaagctcatactacaagattatcaaacgacagcccgtcaagcctaaacggtcaaagcttattgctagaatccatgagatttttaatcatcatcaaggccgctatggatatcgcagagtagctttgcagttaatcagagagggctggaaagttacggagaaaaccgttcgctattggatgcataaattaggtcttaaaggcatcaggcgcaataagcgcaaatattcaagctataaaggtactattggcaaaatagctccaaatttaattcatcgtgatttcttcgcagccctgcctaacacaaaatggtatactgatatcactgaatttcatcttaataatgaaaagctttatttatcgcctattctagacggctgcggtggcgatatagtttcttatactatctccaaacatccagatatagatttagtaatgacaatgcttgacaaggcttttgccaaagaaacagctcttaataactgcatttttgatactgatcagggctgtcagtatcaaagccctcgttatcagcgagctttaaaactccatggtattactcaaagcatgtccagaaagggcaactccatggatgatgggctaatggagaacttctttggcctgctcaaaactgaaatgttctatgatcaagaatacaagtatcataatcttcaagaattaactcaagcaatcgaggaatatatcgaatactataacaacgaaaggataaagagcagattaaaaggcttaaccccgaaagagtatcgaagtcaagcctctattaatccaatattttaattgtctactttttacgtctcagtacatttttacattaattactattatttttcttcttaattagttaatttaaaaagttctggtcaaaacctgacacctttgacacttttcctctcaacaccttgatactactagctttatccatcatatctccattgacaccaaaacaattcaaaagctacccaatgcttgatataacaataatctgctagtgtcaacttaaccaacaccagaccgacaccatttgagttaataactgacacttttcaaatttcaagattcggtgtcaacaacggtgtcgcacatcgactaaaatgtgtcagctaaaccgacaccaaattttaacttggctatgtagattctcaaccattcgcactatattaaatgcaagcctgttcaaaaacttttagctttttgaatgaacgtgctgggcctacaacatcaagcttaaatgatgttcagaaacttatggtcaaaaaggatggattgaaatgacggaatatggctatgctagggtgtctacaaagggacaagaactagcagatcaaattaatcaattgcaaactgctgggatcagtgaggattgcattttctccgaaaaatttactggaactacaactgaccgaccacaatttgctaaactaactcaattggcgaaaccgggtgatgtgattacggttaccaagctggatcggttagctagaaatacccgggaagcattaaatgttattgacccactaatgaatcaaggagtgaagatcaatgtacttaacattggcatgttggaaaactcaactgtgggtaaattagttaaaacaattctcttagcagtggcggaaatggaacgggatatgattgtggaccgcacccaataagggaaacgttatgctaagttacaccggtctgattatcatgaaggacgaccccaaagagccattaccccgcactaccaagccgcttatgagtacttgcttactcattcctacaaacagactgcgagtgcttttgatatttcgatttcaactttgcaacggatccgaaagcaggtggagcaaaataatatagcttagttttaaaaaagtatatattattttgcgctggaggatttgaaaaatggtaaaatgttataccccatttatttactggattgatactaccggtctagactggcaaagcgatgaaatcattcacctaaccataacggatttatttggtaacattgtgttctcacatctgtttaaaccagtgaaaattgaaagttgggacccaactcagcagggtttccacacaaaagcacttgccccccccacatattcaatatataataaattacgcgtggtgctagttaagtcgttttagttaataaaaaagtccaatcggattagactcaagttgtaacttaaattaaatagaaaagagtctgatctaattgaactatctcaagcttaatcgtttttctcaccatttacaagttagctttgctcggctaaatgtaatttgtcgttctttgtacaagctttgtgctcctgatgagctgaaataccgtaaaaatattgatcaggttaagctcttagacagttctattttagcaatgcttatttggcaaactgaaattggtatcgaatctcaaagaagattttgtaaattctttgtcggtttgtctcattctcgctttaatcgtcgggcacgaatgcttttgcctttaatgcgctgtatccgtcaagattggaatcaagaagtaaaaacagctggagaattcttaattattgacagcttcccagttccagtttgtcagcccatccgcaactatcgcgtcaagatctttcgtggcatatctgatatcggatataaagccactaagaaaatctattattacggcttcaaggttcacgcgatagtaagtgatgacggctatgtgctttggacaccatatcgaagaaacatgaaaggcgctaaaaagcataacgatcatcaactgatggcaattagaagaacaattgagagcgacttttctttgcttagctactataacgctgaaaataactgggcaaggagcttagctggttttcagcagcggctagaaatagccattttggcttataatatagcatattgcctagaacgatttaactagcaccacgcgtaataaattgcgtcttagaaagaggatataaaatatggacaaattacataagcaacaagtagcaaaacgacaacgatttgccattaagaaattaacagttggaacggcatctgtccttgttggcttaaccttcattattagtggtaatgccaaggcagatacgacagttgctgctcaaaatacattcacgactcaagtgactgatccacaagttagtgcccattcaagcaatattcggattagcgacgaatcaaatacggttgttcatcaaacttcatcaacattagttccaaataaaacaacaacgccagcgcaacaaatgccgataatccataaaacacagcaaaacaaccactgcccagtaagtacaacaaacacagcaaaacaaccactgcccagtaagtacaacattactatgaattttcgcgatgtcaccctacataagccaattcaagtgattagtaatggtcattatgtattcaaacaacctttcaagcagaccacaattcgaccaggggatagtgtggatcaagaatttactgtggccggttataaattaatgaattcagaagttttgaataagtatttctattttgataaacaaggtaatgcctgccttaagaaaggtattactacgcaagacattaacattaatttagattacgcatcattgtcaccaatcaaagtagagtatgttgatgtagataacgggcatattttagcatcaatcgttctagatagtttctggatggcccctgaatctccacaacaccgtgctggtgataagaaagcaccggatgcatcacgctatgaagccgcagccattaatattcctggatataaattagtttctgaacctgttttaaagggtaaaatcactggtcaaactcgaaattcgttagctgatcctaactatgtttatttaactttcaagtataagaaggttataaaaaataattctgatagtaataggactgaattgttacttgttccagaagaaacaaatctaccgtacaaactctttacgattgctggtagctatggcgaaaggattgacctaaacaatggtaattatgagaaaaaaatgagtgaggagattagccattacgaaaaacaaggttactcctatataggaagtacagggacatatcttaattctgattatttcaattggtacgctaaggggatacatgtttacttgctaccaaacaaaccagtaactgtgaggtacattgatgagcaaggaaatgtgcttaggaataatgatacgcttgcgttcaacctagataatcctaaccaaaaaaataatggggttaatccgcaaaaaggctggtatgcaaagggtccatggcaagtccaacctaagaaaattaaaggttatcgtcttgttcgtactcttggagcgacgagtggccagtatactgtataccagtacatcacaacttttgtttacactaaggacacagatccaactgatcccaaaacgccagagacaacaacaacaacaacaactgatccaaagacaccaagcgataagcttccggacaatcctggcaagtctggtcagacagttccagttaatattcacattcctgatggttatcaattagttcctggtgaaagtgttccaacattttacaccttcaaggatggtaaccctaatcaaatcattagttgttggttgatcccaactaatggcggtcaaccaacaactaatgatcatcaaggacaaggaacaccagctactaatacgcctacaaacactactcctaatggaaatgctgttactggcaaactagaaggtaatgttcctaacatgcaaactgggaagacgattacgtttcaaccaacgacagctaaggataaccaactaccacaaactggtaatgacaatagcttaacaaccgttgccgggattattgtaagcctgttaaccagttgcttagctgttcttggcattaataaacatcaaggctaatatgattacctaccaaccattccgaagctaatcaagacgcgatgctttaattagcttcggaattttgaatgatatatcattataataggatggaataaactttatataaatataagtaatggggattgatttctaatcttttaagaatactgtttatggctgattttttatacaatgtttccaactgagagtaaatataaaaagggagatactatgttatcagcaaagaattattacggccgtctggtaaagttaaaaccaaaacaagatcatttttcacttcgtaagttatctattggtcttatttctgttaccataggtattaccttatacttgggagtggacaactcctatgttatggctgatacgaatttgagggataataacaatcaacaattagccggatcgggtaatggcaccaatataataaatgataaagttaaaattccaaccggtgcttttcagtctaaacaaatgcaaactgaaaattgcaaagtaaataatcagatgttggataaaactgaagtaacaaattctactaaaaattcttctacactaaatgtggaaaattccaagactgctgatttgtcgagatttgattactctttatatacaaaaaaagtaaagagttttgaatttagaaattcagataataacgatgtaattagaacagtaatattaaacaaacctaccggtgttgaaactgtaactatgactttgaatgttagctgcttaaaagggagaaagcatcagcatcgatcgcacacatctactagatcgagtatttataattataaacctcaagttattgctgaagtaaatacatccaataatccattgccaaaaatatcaattttggagaaaaacgttttaccaaaaactttttttcaagtagataagaatacatttcttactcaacaggataaagagaactatgagaaatttatatcagttaataagaatgatattagcatagaattaccagctttttccattaatgatattgatattccaggctattcttatcatattaatgcaaaaaagactactcctggagcaggattaggtaaagaaaagttttacatctacactgaatcaccacaaacagttgttatcgactataccccgattacggttaaggttgaacataagatcatcacggtaacaccaaccgatccgaagacaccaagcgataagcttccggacaaccctggcaagaactatccaaagggtgttgacaagactgatttgaataagacaatcacgcgaaagattactgttatcaagcctgatgggacaaaggaagcccatgatcaacggttaacctcacccggactgctaccgttgatgaagtaaccggcaaagtaacttatagggactgggtaccaggaacctgggataactttgatgtgccagccgtatctggctacacaccaagtcaaagtaacgttccgaaacaatcagttactgatggcactaaggatactactgtaacaattacctacacgccaaccgaacagactgggaagatcacatacgttgatccaaacggcaaagaagttggtactaccccattaacaggaaagacggatgaagagattccagttacaccaaacgttcctgcaggttggcagattgttcctgatccaaagattccaacaaagatcaccgctactccagacggcattcaaacagttacggttaaggttgaacataagatcatcacggtaacaccaaccgatccgaagacaccaagcgataagcttccagacaatcctggcaagaactatccaaagggtgttgataagaaagatctgaacaagactgttaagcggacgattactgttaataaaccagctggctcaactgttgatgctagtcaagagactactctaactcggacggctactgttgacgaggttacaggccaagttacgtatggcaaatggacaacctcaaagcttgataagtataatgcaccagaaattccaggttacactccaagtcaagcagaagtccctgcagttgatcaggtaacggttgattacacagatccaaaaattgaaattacctacacgccaaccgaacagactgggaagatcacatacgttgatccaaacggcaaagaagttggtactaccccattaacaggaaagacggatgaagagattccagttacaccaaacgttcctgcaggttggcagattgttcctgatccaaagattccaacaaagatcaccgctactccagacggcattcaaacagttacggttaaggttgaacataagatcatcacggtaacaccaaccgatccgaagacaccaagcgataagcttccagacaatcctggcaagaactatccaaagggtgttgataagaaagatctgaacaagactgttaagcggacgattacgtctcaaccaacgacagctaaggataaccaactaccacaaactggtaatgacaatagcttaacattaatgggcttaggtgcctccaccttattgggaatgtttggccttgctgctgtaaacaagaagcgtaagtaatcaaattagctctacaattttatccctttgtcagtactgatgaggtattttgatgaggttagtttaagtagcgaagctgcttgagctgaccttttcttttagcttagtttttaccatgagatttgagagctagtagacttcggatacgggaatgatcaaagttgcgaaaaccataagctgttattctagtggtcttaattttattattgtaagcagtcgttatcaatacgggttgaacaaagggactctacaattgtaagtactgatgaatttaacatcagtgcttattttggttttctacgaatagtcaaggatattaaaggaattccttggaatttagctggatagaaaagttaattaaataattaaaatggctcaaagttaaatttaaagtataacaaaacaagctcatgaactagatttattgaacctgtcaaatcttttgtgtaaatagttctttctcgtaaattgatttttgaattatttattcaaaataagattctaaggtatcctgaacctgaccaaagcctttatgaattcggttgaaatagcggtcattgtagctcattgcctggatgccaataaatgcatcaagcgactgttcagttggaaattctgccttaggcttagctttacgcttgatgacgttgttaaaggattcaatcatattggttgaataaattgaagctctgatttgtttgggataattgtagaagaccagcagatcgggctcaatttccttcaaacctttgatgacattgctataagctttattccatctggcatagaatttgtgcaagacagctgcagcttctttttggcttgtctgttgatgtatctgcttgaattcgttcatgatcttttcgcggtcatccacccggactttagcacagatattgcgcatgacatgaaccaggcagcgttgaaaatgagctttaggataagtcctggccaaggctgttttcatgccaacaacaccatcagaaagaaagagttcaacttgcttcaagcctctggacttcatgttttgaagcatctctgtccagacttcaatgttctcactaggagcaatgcagtagtcaatgacttccttatgtccattaggtttaatgccaatggcaatatatactgcttcacgctcaaacgtttctcggcgcaaaggaaggtatgtcgcatccaaatagacacagaaaaacttgtcgcttagcttgcgcttgtgataagcctcaaccttggggagcatctgcttggaaatatttgatacttgagctggactataatgactgccatacattttctcaatcaagtcagcgatttctctggtagttacgcctttggagtagagcttgataatcgtgctttccaaaacatcagagtgctgcttgtagtcaggcagcgtgtgctgatgaaactgaccgttgcggtctcgaggcacttgcacttcaattggtccaaactgggtatcaaccttgcggaaataagcaccatttctagaattgccagtattccagccatttctggcatagggatcatagcctagaaaggcagtcaactcagcttctagcaagttattaacagcctgttgtagctctttgcgcaataaatcatttattttgtctggattgaatagagcttgagcaaaatctttggtaaaatcattcatgaaggagttcttctttctgtatgtgtttttttgttcaaaccaatcatacgagaaaggaactcctttttctaatgtttaaagaaataaatttaaggaatcattcatccttacacaaactattttacagtctctccaaagagtttaagcagcgaactattgaacaagcaatctttggcaataaaccatacttacagctgcctttggaactggggtttaaaagtattggcatgcttaacaattggattagagaatataagaaaaacgggtataatgtcattatcaaacagaaaggacgccctgcccgtgaccaaagaaaagcagaaatctcgcaaggaactggagaaagagatccagcagctgaaagaagaaaacttgcgattgcgtattgtgaacgaatacgtaaaaaaactaagtgccttggatcaagaagatcagaagaaatagctagggtgattacggatctaaggcaagaattcaaagttagtttaaattatgtattagctgcgattgcagagcaccctgagctacctataattgccagaagctcatactacaagattatcaaacgacagcccgtcaagcctaaacggtcaaagcttattgctagaatccatgagatttttaatcatcatcaaggccgctatggatatcgcagagtagctttgcagttaatcagagagggctggaaagttacggagaaaaccgttcgctattggatgcataaattaggtcttaaaggcatcaggtgcaataagcgcaaatattcaagctataaaggtactattggcaaaatagctccaaatttaattcatcgtgatttcttcgcagccctgcctaacacaaaatggtatactgatatcactgaatttcatcttaataatgaaaagctttatttatcgcctattctagacggctgcggtggcgatatagtttcttatactatctccaaacatccagatatggatttagtaatgacaatgcttgacaaggcttttgccaaagaaacagctcttaataactgcatttttgatactgatcagggctgtcagtatcaaagccctcgttatcagcgagctttaaaactccatggtattactcaaagcatgtccagaaagagcaactccatggatgatgggctaatggagaacttctttggcctgctcaaaactgaaatgttctatgatcaagaatacaagtatcataatcttcaagaattaactcaagcaatcgaggaatatatcgaatactataacaacgaaaggataaagagcagattaaaaggcttaaccccgaaagagtatcgaagtcaagcctctattaatccaatattttaattgtctactttttacgtctcagtacagtgctttcgaggcttttcttttatattattttttcttagaaatagagtcacggatatttaattgactatggcaagtgatcgtaagtggaatttgaatatcttccgtaattagatctttagccaaacgaacggcagtcttgcccatttcttcagtattcatatagacactggatagggtaggagttaagaagcgattgatatctacatcatcaaaactaacaacagagatatcgtcagggatgttaacacctgcatcactaaaggctttataaacacctaatgccataggatcactaccgacaacaacagcagtaggacgttgttgcagttttaagatctcttttccagcttcaaaagcagagttagttgaccaatcagtaataaaagaatggcagtactggtcaagattgtggagtttcatccaggacaagtaagtgagttcacgtagatcatttttttcacaagcaatcttaccgtcaagatcaagaaccaatgattttccaccgatgtaaacaatgttcttgtgtcccaggttatagagggtatcaagaatatgagaagtttcttccacaaaatcattacgaacgatattacaattatgaatattggtgttgacgtcgataaaaattatatggggattaatgctttgaatctgcttaattgctacaggtgtcatttcaccctcgattagcactgcgccaaatttagctaagtcagcccaatttttattatcatcttctattctaaaaggttgctcaatacgtaaatgccatttcttggcttcttcattaatgcctttatgcagattgagaaaatagggatcggtgatttcacgagatttgttataacgcatgattagtgcaatcgagagctggttatcagtttgcttgggaccaggatgtttttgagatttcgaataatgcaggcgtttggcggtttcgataacgcgggcacgactagcctcattgattctaaaagttggatcattgtttaaaattcgtgatacgctagctggcgataccccagcaatacgtgcaatgtctctaatacttgccataaagctgctccttgtttgtttactgtttacattatacaacttttagcaagaaactggtgtataccgaacttgaggataatagtttagtgtccataaagtaagtcatattgaatcaatgttacttactttatggacactaaatttacttattttactacactacatagtaaagtgtagtaaaataagtaaaaaagcaattgaaaaagaagaatatggaaataataaaatcttaataatttgttcgcttgtttttatatttgtaattcattaaacttatgttcgaaataatgaaaggagaaatatatttttcaattgtaggtaatataattccatattcgtatattgacagtacttatgaaacaaaaatcattgattagtcaactagcaaaaatacataacggtacaattactcatcgtgaattagcattaaatggagtatcaagttatagtatttcgaaagctgttcaggatggtacgttagaaaaaatacgtccgggaatttatttatttggtgatgataccgaggatatattttatagtttgcaacaaaaatataaaaaaggaatctattctttagaaacagcattatatttatgggggttaagtgatcaatatccttttagcttagatatgacttttcctaggggctacaataatccaactttggatattgaaataaatccacatattcaaactaaaagtttggctactcagggaataactcaaactgaatcattcaatggaaatgtgattaatctctatactcctgaaagaactctagctgaaatattgcgaccgattaatgctgtagatatcgaaataattaccaatgccttcaagatgtggaataaggaaaagaaaaaagacataaatacattaatgtcttttgcagaaaagtttagggtaactagaaaggtaaatagctacttagaggtgttgttgtgaaaaattatgttgatgagaagcagttcaaagcagatgtaagaaggtatgctagagagcataatataaaaggaaatgagattggtcgattatggcaagaaattatgttagatgatttgctagaaagaatttcagtatcaaaatatcgagataatttcattttaaaaggtggttttttgttgtcggctattgttggtatcgataaaagatccacggaagacattgatgctgagataaaaggattagatttgaccgaaaaacaaatagctaaagtatttgaagaaatctgtcaaataaaattagcgggggatctattaagcatttcgttgtcagaaactgaacagattcatgagcatgaagagtacaagggctatcgattacattttaatgcttcttttcggaagataagatatccattaaaagtagatgtttcaacaggggatgttattacacctagggagattgaatatagctataaattacatttagaagatcgacatattaatatttgggcatatactatggaaactatagtagcggaaaaattagaaacggtaattacgagaggaatagctaatacacgtatgaaagatctctatgatttattcatactgcagagagaacgaatcaatttagctactttaaagtcagcttttgctaatactacgaattaccgtgaatcaatcttttggacaggacaagatatggattataagtattgtctaagacaagtagatattattgctgaaaatagtaatatgcagaatctttggaatagatacgtgagaaaacatccttttgctaagggaatcacttttactcaagttattcaggcagttcaaacttggctaactaaattagagtttgaaaaataatttcaatcaaaaatgacgctaattgatcgaaccagcgtcatttttttagataatagatgtagaaaatagtttgaaaaacgattagtttttatagaaatctttattatactttacttgtcttcgtagccctttgggtgactcttgtgccagttccaagcagttgcgataacgtcatcaacactttcatgctttggcttccagcccaaaatagttcttgctttggttgaatcagcaaccaaagagtcagggtcaccgccacgacgtggacccattgtgtaaggaatatcaatccctgttacttttttagcagcgttcaaaatttcaaggttggagtaaccttgagcagtacccaagttaaagacatctgacttattagtctccatcatatgtttcagtgccaaaatatgagcatcaattaaatcttcaacttgaacgtagtcacgaacgttggtaccgtccttagtgtcatagtcatcacaaaagatagtaaacttaccatccccagaaattgcactcttcaaaatatttggaatcaagtgtgtttctggtgcgtgatcttcacctattgtgccatcacttgcagcaccagcaacgttgaagtagcgaagagcagtgtacttaataccatcagctttgtcagcccaagccatgatcttttccatcatcatcttggtttcaccatatgggttgattggatcaagtggggtgtcttcggtgattggcaatttcttaggaataccataagttgcagcacttgaagagaagactaagtatttaacaccagcgtcattcatagcttgtaataatgaaatcatgccagtaacgttattgtcatagtacttaagtggctttttaactgactctggaactaatgaatatgctgcaaagtgcattacagcatcaatcttttcatcacgtaaaattttgcttaccaaaaaagtatcttcaatatcgccttggtaaaacttagccttaggatctacagcctttctgtgaccagtatataaagcatctaagacaacaacatcattgccttctttaactaattcgcgtacagcgtgtgagccgatataacccgcaccaccgacaactaaaactttcatgttttgcgctcctttattttagttattatcttttattgaaatcgattacattataacacatattttagtaaataatttacttattttagataaattatttaaaaacactaatttagtctaaatgaaaattcatgatcttgacttgggtcgatttgatattgatcttcaacatctgtaccccagctatcgatgccacctacaccgcgaacggcacctgcgattactaaaactgttctccgggcaagaggcaattcttcaatatgcgttgcattttctagttcttctgctgtgtagggaaggcaactgaagttgaatggcttatcagtttgctcaacggtgaggtcaaaatcctcattagaatgatcagcattgttgagcgtagtatttctagtgattttgagtttatgcgtttgcatgtgcatcccattttcctgtggcactaggtatttggttactggcaatcccttaattttaaaagagccagcactggctccagccatccgatcaggataagtctcaccagataagccttcatattcaaagccactagctagagttggtatgataaagcgcattccaattactggaagcggtggtaaatcttttttaccaaaataacgcatcttaattgtaacatgaccattattgttaatttggtaagtaatttcaacttttgtttttggaatagttaaagtttcataaataaaagtaatttcgactttacttgcgtactcatgattagaaaattggttgttgagcggagcgattggcaaatctgcaaaatcatgttgatcaactttgagctgaatttcagtacagtggctaaacatatcggcgccgagccattgagctgcttttaagttgaaaccgttgccgcgatcgttatcagtagttgcacgccaaaaggttggggtaggaacgcgataaaaccattctttacccttaatttttaaagactctaagccacctttttcatagctgaaaatatattgcttatctggggtattaatgcctaaagtagcatccccatagattatatgtaaattatttgtgtaagccatagtagtatttaacctcctgcattgctggttttggtgtacgatcggcgaacattaagccatcgcctgaaaattcataatcagagtgtcggtcgtcaaagtcgccgccataccgtaatacttcttggccactcaccggatcgtgtactaatagcgcttggtcgatgaagtcccaaataaagccgcctaaatattgtgggtattggtcaagcaatttaatgtaggaacccatgccaccatcagaattacccatatcatgcatatattcgcattctaaaaatggcttttgaggcttatttttaagatattcttcaacatcttttggtggtaaatacatccagctttcaagatcagaaatcttgtcctttaattctggcgtatgaaccacgccttcatagtgggtcaggcgactatgatcgtgtgctttataaaatttattcatagccgcaatgttttctccggcatatgattcattgccaagagaccagaagagaatggcggtatggttttttaaagtttcataattgttgcgggcacggtcaattacagcttcacgccattcaggaatagaaccgggaacattatctgaaggttcaacttgtcccatcttttgccaagtaccatgtgattcgagattattttcagccatgacatagattccattttgatcgcagagatagtaccacggaatctgattaggataatggcaagttctaaccgcattgatgttattttctttaaaagcatgtatatcttgtttcatatcagttaaagtgatgctgcggccacgcttcatattccattcatgccgattgaccccattaataattagacgttgaccatttaataaaacaaccttgtcagaattaatttcgatttttctaaagccgaattggtaaggaattagttcaagtaaatcaccattttcagcgtgaacttcaataattagttggtacaaatatgggtcatggttatcccaaagatgcacatttttgaataattctttttcaatttttatggttaagctgattggtgcttttttctcaagtagagttttgccattaatatcttctacgaacaagtgaactgagccagtatttttgcctgtaaagtgcaattgagcattaaagattccatcttggtaattatttgtaacttctggttttaaatcgagatcggttaaatgcgtctcaggtaggccgagcaattcaactgaacgaaaaatgccagaaaaacggaacatatcctggtcttccaagaaagaggcagtgctatgtttgaaaacttcaactgctaaaatattgtttttgtttttaatgtaaggtgttagatcaaattctgaaggagtgaaactatcttcggcgtaaccaacaaaatgaccattgagccaaacatacattgctcgctcaactccttcaaaaacaatgtgaacatcacgacctcgcaaagtggaatttaagtcaaaatgcttaatgtaagagccaactgtgttatctgcacctttgctaaaagagtcggtagctttttggttgattgtgtaagcaggtcgacgataaatttttccttcccacggaaagagcgtattaatatattgattttgagcgtaattatttagctcaatttcacttgggactggaatgtgatcaaatgatgaagaatcgaaatctgttttaaagaaatcaacgggtcgtgtttgtggattagctgaaaacttaaaacaccagtcaccatttaaactttgaacaaaactactagtttgcttttgccattcgcgatagttcttgaaatagggatgatcgctgtgggcaggaacttgattaacgcggaaaacttcggggtcatcaagccagctaagatttgctttcatgaaaatacctgatttctataaaaaaattaaccttgaaaacgcttatattataacacatagataataaatttacttaataagtaaattatttactgaaaaatattttgaagattaatatttttgactcgaaaacgaatgacaaagtgcttatgatatttattggaattacgtaaatattttgtataataaagttaaaaattatttatttaagatagaaaagatataaatatgacaacaattaaagaaatagcacaagaatcagggtattcttcagctacggtttcgcgcttattaaataatgatcctaatttgtcaattacggctgatactaagaacaagattttagaaattgccaataaattgggctattggaaggatcatcaggaaaagaagatccgtccaacaattgcgttactataccgagtaaatcatgaagagcaactgcaagatgaatattttacttcattaaagcaagcgctgatttcaacagtagaagcagagtcgctgcagatgaagactttttatgatgcagatgatttgattaaacatgcatcactttttcagggctttatcggagttggcgcggcgccaattgaaaatgcaacactaaaaaaactccatgaggttttgcctaatggggtctttgtcgatactaatccagccccggaattatttgattccattcgcccaaatttaacgctgacagtaaaaaatgcaattgatctttttcttgataaaggatatcagcgcattggttttataggtggcattgggcctaagcatgatcatattcaagaagtagatgtacgtgccaccgcttttgcggagtatatcaaggtgagaggcaaaagtgatgaattgatgtttgttaatggcccgtttagcgttgctaatggctataagttgggaaaagaggtactggctaaatgcaaaaataaattgcctgatgcatttttaattgcttcggatactttggcagttggagttttgcaagcttttaatgagaacaatgttaatgtgccaaaagatactgcaattttaagtattaataatagtaatgtggttaagtatgtttcaccgccactttcttcttataatattgatcaacaagagatgattgatatggcattaaatatgctaacgaatctgattattcaacctaatcgggcacacattgatgtaaatatgaatactaatttagttgtgcgcaagagttttgtgcctaagaagtaaattaattagtaaataaaaatattttttagtaatactatcaaaagagaatgctaatttaatgcgttctctttttgtttagctttcagtaaagaatttattaaatataaataaattctttacttaacaaaaatagagaatatactaaactgtgtaaacgattacaattaatgattgctttagggggcaaatttatgacacacagtgacaagtcagggaagcagattctttcctacgcatcattctgtttgggtaacttaggtcactcggctttttatggtgtgatgagtacatattttattatttttattactagcagcatgttcagcggacttaatcagtccgttgcagataagctgatcggcttaattacaggattgatggttgtaattagaattgctgaattggtaattgatcctattctaggaaatatagttgataatactaaaactagatggggcaaattcaaaccttggattttaattggtactttagtaagtgccgccttattattagttttgtttactggcatttttggattagcacaaaaaagttggattctctttgcgattttatttgtactaatttatatcagttttgatgtattttattcattatctgatgtttcttattggggcatggtaccagctttaagtgaagattcacatgcacgtggtatttatacttctttaggtgccttttcaggaacaattggttggaacggattaacaattattgttgttccattagttacagctgtgacttatgcggtaactggtaaacatgaggaaggtgcaccaggttggttagcatttgcggcagtaatttcagctttggcaattgtatgtgccttgattgtttgtttcggtactaaagaaaagcataatattattagaaactcagctaagcaaaagactagcttaggtcaagtgtttggagcaatttttcataatgaccaaattttatggccaagtttagcatacttgctttactcattagcatatgtaattaccaatggtgttttgttctatatgtataaattcgttattggtaagccaaatgacttctgggtagttggtgttattgcaacaattatcggtttctgtattagtccaatgttcccaattctgaacaaatacattccaagaaaatggttattcatcgctggacaaacttgcatggttttagcttatgttttgtttattttcggcagagacaacgtatttttgatggacttgggcttggttcttttaaacattaactttgctcaattggtaactgttttaacattaactgacgcaattgaatatggacaacttaagaatggtcaaagaaatgaagctgttgttttagctgttcggccgatgattgataagtttaccggtgcggtttctaatgctttagttggttatattgcaattgctgctgggatgaccggttctgcaactgctgcagacatgactgctcatgatattagcacctttaatatggtggcattatatatcccacttgctttggcagtcttatcaatcgtagtctttttgactaaggtaactttatctgaaaagaaacatgccgaagtggttgaagaattaaaagatcaacttgcagaaggtaagattgaaaagaatgaatctaatactcaagttagacctcaagatcagactatctatgctcctgcagacggtaagttaatgaagatggcagaagtaattgacgaagatggtaagccattcccaggaaagggttttgcaattaaaccagattcaggcaatatttatgctccatttgatggtgtagttaggttcacttttggtactaagcatgcttttgaaattgtttcaaataatggtttacaagtagttgttcatgtcggcttaggtacagttaacttgcgcggtgaaggttttgaaacttattatgatgatggtcaaaaggtaaaaaaaggtgacttgctgttagagtttgatcgtaatttagctcttaagaatggctatcaggacactgtagttaccttctatacacaaccaggacgaattgtaaaatctagtgaaattgaagctggtaagattgttgagcatggtgaaaaagtattagatgtacaatttaagtagaggaattacaatgacacagttaaaacgttttttatatggtggggactataacccagatcaatggccagaagacacttggtcagaagatattaaagtttttaaaaaagcggatttaaattctgctacaattaatgttttttcttggagtttgcttgagtcaagagaaggccaatatgatttttcaaaattagatagaattattcaagaattgtctgatgcaaattttgatattgtacttgctacttctactgctgcgatgccagcttggatgtttaaaaaataccctgacgtagcgcgagttgattatcaaggacggcggcatgtctttggcgcacgacataacttttgccccaatagtaagaattatcaagttttagctagtaaattagtcgagaaaattgccgaaagatatagtaataaacctcatattgctgtttggcatgtgaataatgaatatggcggcaattgctactgtgaaaattgtcaaaatgcttttcgtacttggctcaagagtaaatatcaaacactagataacctgaatgaggcctggaatatgaatgtgtggagccatactattcatgattgggatcagattgttgttcctaatgagttaggagacgcctggggaccagaaggtagcgaaaccattgttgccggtttatcaattgattatttacgttttcaatctgatagtttacaaaatctttttcagatggaaaaatcaattattaaaaagtatgatactaacactcctgtaactactaatttccatggtttaccaaataagatggttgattatcaaaaatgggctaaagatcaagatattatttcttatgattcttacccaacctacgatgcacctaagtatttaccagcatttttgtatgacttaatgcgtagtttaaagcatcagccatttatgttgatggaatctgcaccgtctcaagtcaattggcaaccatatagcccgctgaaaagaccagggcagatggcagccacggaattgcaagcagttgctcatggtgcagatacggttcagtttttccaattaaaacaagcagtaggcggctcagaaaagttccatagtgccgtaattgcccactcacaaagaaccgacacgagggtctttcatgaactagaagatttgggtaaaaaattaaaaaagattggcccaactgttttaggctctaaaactaaggctagagctgctattgtatttgattgggataacttctggtcatatgagtacgttgacggtattagtcaagattttaattatatggaatcaatcttagattattatcgccaattttatgaacgcaatattccgacagatgtaattagtgtcgatgatgattttagtcaatatgatttagtagttgctcctgttttatatatggttaaagcagggctaagcaaaaaaattaatgcttatgtcaaaaatggtggcaactttgtcactacctatatgtctggaatggttaacaatagtgataatgtctatcttggtggctatcctggcccgttaaaagacgttatgggtatttgggttgaagaaagtgatgcaattgtaccaggacataagacaattgtttcactaaatggcaaggattataaagcgggtttggtttgtgacttgattcatccagaaaatgcaaaagttttagcaaagtactccaatgagttttatgcaggaacggctgcagtcacggaaaataaatatggtcaaggtaaggcctggtatgttggtactaagttggatcacattgggttgacgcagctattcaaccatattgttttgacagctaacgttgaatcattggtgggcgacagtcataagttagaagttactaagcgagttactcagtctgggcaagaattatactttgttttaaatatgagtaatgaagaaagaaaattgccacaaaaatttgtagagtatcaaaatattttaactggtcagcaagctcatgatcaaatgaaggcatgggatgtacaaatacttgttaaataaatgattttttccttaatgaagacaagaagttagacaaacgatctagcttcttgttttttacttaaataaatattttatttatttaagtaaactatttactaaaagatactgaagagatatactaataactgaaaacgattacagaataaatttgaggtaaaaacaatgaataaggaagaattacttaaagaatatgagacaacttttggtgaaaaaggtaaggatgtctttttctcacctggtcgaatcaacgtgatcggtgaacacactgactacaatggtggtcatgttttcccagctgcaattagtttgggtgtttatggtgtttacggcccaagagaggataaaaaagtttgcttgttttctggcaatgttgatggcgatatcgtggaattcgatattgacgacacaactgttgagaaagatgatcgcttttgggctaactacttcaagggcatgattacgtacttacgtgaaaaatatgacaacattgatcatggttttaatctttatatcaaagccaatttaccatcaggttcagggctatcatcaagtgctgccattgaaatgctaatgggcatcattttaaaggatgaatttaacttagatgttgaccggattgctttagccaagatgggtcaaagaacagagaatgaatttgttggcttgaattcagggattatggatcaatttgcctgcattatgggtaaaaaagatagtgctatcttcctcgattgcaatacattagattatgagtataagccactcgctttaggcgattacgaaattattattatggcaactaacaagccacataccttagccgattctgcttataatgatcgtgttcgtgaatgtcatgatgcagtgaagaagttgcaggctaagttagatattaagactttaggtgagcttgataatgatacttttgatgaatatgcatatctgattaataatgaaactgaaattaagcgtgctcgtcatgctgttagtgaaaaccaaagaactttgcgggcaacaaaggccatgcaagatggagatttggaaaaattgggacgtttgattgatgcttcacacgtttcacttcattacgattatgaagtaactggtcaagaactagatactttagctgaagcttcatgggctcaacctggcgtcttgggtgcaagaatgattggcggtggcttcggtggtagtgccattgcaatcgtcaagaaagaccaagctgaggcatttaagaaaaatgttggcaagatttaccgcgacaagatcggttacgatgccagcttctatgatgcggaaattgttgatggaactaagagaatttaatcaaacaagaggataagtatgaaagttattgaaaaatttgcggatgaagttattaatagtggagcgtatgagccgctcgatcgcgtatatgtgattaacaaaattcgcgctttagttggcgatgaggcaagtagcgttgaagctaatgatgaacaaacttcagttaagcaattagttgatttagccgtgcaaaataaaaagatttcggatgatgttacttcacgtgaagttttgaatgatcaactatacgacttgataacgccaacaccatctaaaactaatggcatcttttggcaaaaaatgcaaaaatcacctgaaaaagcaacagattggttttataaactttgcgaaaacaacaattatgtcaaaaaggaagcaattgccaaaaatgttgtattctcagggaccagctctaaaggacatggcttagaaattacaattaatttgtctaaaccggaaaaggatcctaaggcaattgcggcagcagctcatgcaactggtaagaaatatcctcaatgtgcactttgcctagaaaacgagggttaccttggtggatatggcaaaaatgctcgttcaaatttgagaattattcgcatgaatattggtggccgcccttggggatttcagtattcaccatatgcttacttcaatgaacattgtattttcttagatcaaaagcatattccaatggtcatcaaccaacaaactttgattaatttggttgaaattgaaaagacgttaccacattattttgttggttcaaatgctgacttgccaattgttggtgggtcaatgttagcacatgaacactatcaaggcggacgtcatacttttccaatgatgaaagctaagattaagaaaaatgtagtctttgatgattatcctgaagtggttgctggcattgtcgattggccaatgagcgacttgcgcttgattagcgataattcgttagatttgattgaattgggcgctaaaattattaatttctgggatcattattcagattctgctcgtcaaattaaggcttttgatggtaaaacacgtcatcatactgtgactccaattatgcaccgtgaaggcaagaacttcgtacttgatctagttttgcgtgacaacaacactagtgaaaattatccgttaggtattttccacccacataaagaattgcggcatattaaaaaggaaaatattggcttgatcgaagtaatgggccgtgctattttgccaggtcggttaaagagtgaacttgaagaagttaaaaaatactggttgggccaagataataagatggctattagccacaaagaatgggccgatcaaattaaagcagagcagaatattactgccgagaatgttgacgctgtgatgcagcaagctttagttgaagtctttgaacaagtattgcaagatgccggtgttttcaagaataatgcagatggcgatgaaggctgggataagttcattaccgctttaactaggcagatttaactcatcaatgtgtaaaacgagatctgttggatctcgtttttttgttagcggtaactcatatattctgatggttaaataatttataatatttatgaaagcgaatacaaaagagaaactgtcaaatcttttgtgtaaatagatctttctcgtaaattgattttttaattatttatttaatcaaagtaggattctaaggtgtcctgaacctgaccaaagcctttatgaattcgattgaaataacggtcattgtagctcattgcctgaatgccaataaaagcatcaagcgactgttcagttggaaactctgccttaggcttagctttgcgcttgatcacattgttaaatgattcaatcatgttagtcgaataaattgaagctctgatctgcttgggatagttataaaagaccagcagatctggttctatgtctttcaagcttctgataacatggctgtaaaccttgccccatttggtatagaagtcatgcaggacagctgtggcttcttctttgtttgtctgttgatgcacctgtttgaattcgttcatgatcttttcacgatcgtcgacgcgtactttagcgcagatattgcgcatgacatgaaccaaacagcgttgaaaatgagctttaggataagtcctggccaaggctgttttcatgccaacaacaccatcagaaagaaaaagctcaacttgctttaagcctcgggatttcatgttttgaagcatatctgtccagacttcaatgttctcgctaggtgcaatgcagtagtcaatgacctccttgtgcccattaggcttgatgccaatggcaatatagactgcttcacgctcaaatgtttctcggcgcaaaggaaggtatgtcgcatccaaatagacgcagaaaaacttgtcgcttagcttgcgtttgtggtaagcctcaacctttggaatcatctgcttggaaatatttgatacctgagctggactgtaatggctgccatacatcttttcaattagatcggctatttccctggtggtcacgcccttggagtaaagcttgataatcatgctttccaagatatccgagtgctgcttgtagtcaggcagcgtgtgctgatgaaattgaccgttgcgatcccaaggcacttgcacttcaattgggccaaattgcgtatcaactttgcggaaataagcaccatttctagagttgccagtattccagccatttctggcatagggatcatagcccagaaaggcagtcaattcagcttctaacaagttattaacagcctgttgtagctctttgcgcaataaatcatttattttgtctggattgaatagagcttgagcaaaatctttggtaaaatcattcatgaaggagttcttctttctgtatgtgtttttttgttcaaaccaatcatacgagaaaggaactcctttttctaatgtttaaagaaataaatttaaggaatcattcatccttacacaaactattttacagtctcacaaaagaagggcaagagtatgaagacaagttttagaaaatatggcagaaaagataataaagatctttgtgaaatcacactagagaatgatcacggtatggtagttaaggtattgaactatggtgctacattggaaaaggtgttgcttgatggtgagaatatgattttgtcactggataagccagaagattacgacaaggagcgtaattatctaggcggtacggttggacgtattgccggaagagtgagacgaggtttatggcggcacggcttagaattacatcaattaccaatcaatgaagggcctaaccacattcatggtggtattgggactgatactgaaatttgggattttagacctagttgtaatgaaaaaggtgctcgtgttgatttaacactttttgatccagatgggcataatgattatcctggtaatttaaaattacacgctcgttatgagttagataataacaatattctgcattattcattgggtgccatgagtgataagctgactatttttaatccggttaaccatactttcttcactttaggtgaaaagaaaatgattaatgacttgcaactgcaaatgaatgctgattattatattccagttgatgagactggcttgcctgatcgtggtatggaaaaagttgatggaacagcattcgattttagaaagaagaagcgagttggggatgcattggaagctgatgatccgcaaattaagaaccgcgatggaatggatcatccatttatcctggatggcaatatgccaaatgcagtgctaacttctgctaaacacaagttaacggtaacgactaatgctccatccttgattctttatacaggaaatggatttgatcatactggtaaatatacggctgattttggtccatattgtgggattacgtttgaagctcaagtgccgccagcagaaggtgatgatttgggacgcatcacgcttttgccaggtgaaaaatttaagcggactgttgattggaaatttgaataaaaatatggagaacatccttactgaatgaagtggtagggatgtttccttcttttggatattatgatttgattttacaagtaaatctatattaatatttagaaatcaactgaaaggtatagtaaaaatgatgacaaacgaaaagattattgctttagtcaaggaagaatatctaaacaagattccaaaaatttttcgcaagcatgctgttgaaggcacttgcaagttaatcgctagagaacatcccgatttatacaaggcttttgaagatggtgaaccaaccgcagaagaaaaacaacaaatgacagagttgattaacgggattttcgaacaaagaatgaaaaagcataagatgttataaaaagacgctggaatgtaatgattattagatcgctacattctagcgtttttttgattttaattttgatttattaaactaacaggtagcgtataaacactttctaatgaaacagagggatcattaatttgacgtaaaagtaaatcgcacattaattcagcaatttcttttgtatgttgccgagcgctaattaaatttggaaaaagactttgaatcaaatgactaccatcaaatcctgtgattaaaggtacttttcctaaataatcagcacattctttagctagtaaagctgtaatgtcatcggtacaacaaattgcatcatattcgtcatcctttaaaaattgaaggatggctatttttttagcaataattgagtcactggcactgagtgagcgaagatcgaatttagaatcaaaagtgttaaatacgcgaatcattcctttgattcgatcacttattgggtaatagtcttctttagcaccagcaataataataattttctttttcttttgttttagaacagattgtgcgatttgcatacctgcgtcatagttattagattgaacagttggtatttgaggactaattttacggtcaaagctaacaataggaaactttatttttagtccttttttaggaatcttaataggagagctggtgatcagtccagcgatttccttttgtttaaatcgctctaaatagtaattaatatcttgggattgatagtgatctagatgaagaatacaatcgtatcctttttcctgtaaataaaaggctagatattcaaataattcagaataaaaaggattattaatttttggaaaatcaacctcgattaaatttaatttagatacagagttgacggtaccttttactttatatcctaatttttttattgcttctttaaccttaagagcagattcaatacctacatatccattttgattaatatatcttgaaactgttgctatcgaaacgtttgcttctttagctatatctttaatagtaactaccatattttttcacttccttatgtaaatattacacatttaaaatcctatatcatagtattttgacttatttaaatgtgtaaatttgtgtaaatccattgaaaactgtaaatagaagtgtatgatgtaattgtaaatatgatagcgcttacttaaatagagcgatatttgatcaagaggagtgaaaatttatgaaaaagtggctaaaaagaatagctttaattagcttagtcgctacgatggctttaagtttgacagcttgtggtcaaaataaaagcagcaattctggtaaaaaagtgacaattgagtactttaaccagaaaaaagaaatgtcagcaactttgaaagaaattatcaaagactttgaaaagaaaaatcctgatattcatgttaaagaagttgacgttcctaatgcaggtacggttttgaagacaagaatgctttcaggagatgttcctgatgtaattaatatttacccacaaaatattgattttcaggaatgggcaaaagcaggttattttgaagatatgactcatgcttcatatattaaaaacattaaaaatcactatgctgattcttttaaaattaacggtaagatttacaacgcactacttagtgccaacgtttacggtttcttctataatgcaactgaatttaagagattaggaattaaagctcctaagacttgggccaaatttgaacaaattgttaaaaaaatcaaggctagtggcaaggcaccatttgctgtagctggtactgaaccttggactttaaacggatatcaccaattatctttagctactgttacaggtggtgctaagcaagctaaccaattacttaggttctcagcgcctaacggcattaaagtaaacaatccttatattcaaaaagattttactagattgaacttacttcgtgaaaatgcacaacaaaattggcgtggtgctagttacaacgatgctgttgtttcatttgctaatggtaaaagcttgattatgccaaacggttcatgggcattacctatgatcaatcaacaaaagccaaaatttaaggttagaacatttgcttttccagcagcaaaggctggtcatgaaatgacagttggttcaggcgacttagctttgtctatttcatcaaagagtaagcacaaaaaggcagcagaaaagtttgtagcatatatgacaacacctgctgcaatgcaaaagtactataacgttgatggaagtcctgtagccgttaaaggtgtaaagcaaaggggaattaattctcaattgggaggcttgtctactttggctttcactaaacacgatatggtttggttagcacaagactggactagtgagaatgatttcttcaatttgacggctagttacctgatgactggtaataagcaacaaatggtaaatgatatgaacaccttcttcaatccaatgaaggcttctaactaggaggattaaaaaatgaaatcaaaaagttttattgaaaaacattggggttggttgtttttaatcgttccattgattttacaagcaattttcttctattttccactatttcaaggtgctttttacagttttactaattggactggtttgacttataactacaagtttgtaggaattaataactataaattattgttgatggatcaaaactttgctaaatccattggttttactgcaattctaactatttcattgattattggtgaaattgtaataggtattttagtagctagagcattaaactcaaagatcaagggtcaaacattctttagagcctggttcttcttcccagctgtattgtcaggtttgacagttgctttgatttttaagcaagtattcaattatggtttgccagcaattggtaatgcacttcatattgaatggcttcaaacaagtttattaggtactaatactggtgcggtaattgcaactattttcgttttgctttggcaaggtgtggcaatgccaatcattatctttttagcgggtttacaaagtattcccgatgaaattaaagaagctgcggagatggacggtgctaatagtcgtcaaatcttctggaacattgaattgccatacatgttaccaagtatttcaatggtctttattttggcattaaagtcaggtttgacagccttcgatcaaatctttgcaatgactgcgggtggtcctaacaactcaactacttcacttggtttgctggtttataactatgcgtttaacaataactcatttggttacgccaatgcgattgccattgtcttgttcatcttaattgctattgtttcattcattcaaattaagatttctaacaagtatgccgttgattaaagaggagtatcaaaatggaaaaagaaaataaatcaaagaagttttgggattatgctttactgattgtcggtggaattctgattttaattccattgctctatacatttttaagttcatttaagacaactaagcaaattatgaatcatttctttgcttggccaaatccatggacatcagttaactttcaaagattgtttgcggatggagtaatgggttacttctggaactcaattgtcattacggttttatcaattgtcttagtaatgattttcgtcccaatggctgcttactctattgctagaaatatgtcaaaacatacagcctttaattggatgtatatcttgctaatcattggtatcttcgtaccattccaagtaattatgattccaattactgtcatgatgagtaaaattggcttagctaatatgtggggcttgattattctgtatttaacttatgcagttccacaaacattgttcctttatgtaagctatatcaaacagagtgttcctgaaagtttggatgaagcagcagaaattgacggtgctaataagattaccgcatatttcaagattatcttcccattattaaaaccaatgcatgcaacaacattaatcattaatgcaatgtggttctggaatgactttatgcttccactgttaatcttgaacaaagattcaaagatgtggacattgccattgttccaatacaactatacaggccagtatttcaacgattacggtccaagttttgcttcatatgtagtaggtatcatcacaattacaattgtttacttaattttccaaaagaatattattgccggtatgagtaacggtgctgtgaagtagttaagaatagagacgaggttttaacaatggttaaggtagatttagatcacgtatataaaaagtatgatggtaatgataagtattcagtaacggactttaatttacatattaaagacgatgaatttatcgtttttgttgggccatctgggtgtggtaaatcaactactttaagaatgattgctggactagaggatatttcaaagggtactttgaaaattggtggtaaagttatgaacgatgttgctccaaagaaccgtgacattgcaatggtattccagaactatgctttgtatcctcacatgtctgtttatgacaacatggcctttggtttgaagttgcgtaagtatagcaaggaagatattgataagcgagtacaacgtgctgcaaagatcttgggcttgacagattacttaaagcgtaagccatcagcactttctggtggtcaacgtcagcgtgttgctttgggacgtgcgattgtgcgggatgctccaatctttttaatggacgaacctttgtcaaacttggatgctaagcttcgtgtaacaatgcgtgccgagattgctaaactacaccaacaattgaagacaactactatttatgtaactcacgatcaaactgaagctatgaccttagctgatagaattgtcattattaaggatggtaagcaacaacaagttggtagtccacttgaagtatataacaaaccagctaatgtctttgttgctggttttatcggttcgcctgctatgaacttcttccatgtaattttaaaggatggcaagatcattgataaagataatcatgacttcgaaattccagttccagaaggtaagttaaaggcattaaaagaaaaaggatatgacggaaaagagttgatctttggtatacgtccagaagatgttcatactgagcaagtatttttagaaacctatccagacaatgttgttgaagctaaagtggtagtttcagaattgttaggtgctgaaactcagctttatactaaagttggtaatactgaattggtatcgaaggtagaccaaagagactatgctaagcctggcaatatggtaaagatgggctttgaaatgaataaggcgcacttctttgatcctgaaactgaagtagcagttgagaactgaggttaagtaatgactaaaaacttaattacatttgatgaaaaaaataaagtttttcatttgcataatgaccaaatttcatatctgatttcaattgaagatggtggcacactaagtcacttgtatttcggtaaaagtatcaaagcatatcatggtgaattgcggtacccacgacttgatcgaggcttttcaggtaatttacccggatcattagatcgtactttttcaaaagattctttgccacaagaatacagtagtgcaggcgaaatggactttagaacgccagcaatgattgtgcgccaaccagacggttctaatgcagtatttttaacctatgaaaattatcaaattgtgccaggaaagcctgaactaaaaggtttgcctcatgcatgggtaaagaataaggatgaagctgaaactttaatcattactttaaaagataagtttagtgagctgagatttgacttgctttatacaatttatcgtgatcgttcggtaattgtgcgttcgactaaagttagaaatgctggcaaggaaacggtaaaaattgaaaaagtagcttcgatgcaaatggatttcgtagatcgtgactttgacatgattacactgccaggtgcccatgcgcatgaaagacgggttgaacgaaacaaggttaatcaaggaattcatgtttattccagtattcgtgggacatcaagccatcagatgaatccatttgtagcgttggctgatccagatacaaatgagtttgatggggatgcatatggtttcgcctttgtttactctggcaatcacaagtttgaagtagaaaaagatccgtatgcgcaaaccaggattgttgttggcattaatgattacaactttagctggatgctaaatgcgcaagagagtttccaaacacctgaagtattaatggtttattccgatcaaggtttgaataagatgagccaagctttccatagtatcattcatgatcgcattatgcgaagcaaatacaaagatcaggttcggccaattgtggtgaataactgggaagcaacttacttcgattttgatgaagataagttaaagccaattgttgataaggctaaggaattaggcattgagatgtttgtgcttgatgatggttggtttggccatcgcgatgatgataattcttccttgggcgattggcaggtctttgagaaaaaattccctcatggcctagatcactttgccaattacgttcatcagcaagggcttaagtttggtttgtggtttgaaccagagatgatctcaattgattctaatttgtatcaaaagcatcccgattatttgatgcatgttcctggaagaacaccaagtccagctcgtaaccaatacttgcttgatttaggccgagcagaagtacgtaataatatttttgaccaaatgaaagcaattcttgactcaggcaagattgactacattaagtgggatatgaatcgccacttgtctgatatttaccaagctgatttgccagcagatcgacaaggcgaagtctatcaccgttatgtattaggtctatatgatttacttgaaaaaattgttgatcgttatcctgacctcttaattgaaggctgctcaggtggtggtgggcgttttgatgcaggcatggcctattacaacccacaaatctgggctagtgatgatagtgatgcaattgatcgcttaagcattcaatatggcactagtttagtctatccacaatcaatgatgacttcgcacgtttcggttagtcctaatgagcaaaatggccggattacgccgtttaagacgcgtggtattgtcgcaatgtggggggatttaggttacgagcttgatttaactaaattaagcgaatcagatcaaaaggctgttgctgagcaagtagctgaatataagaaaattagagcagttactcaatatggtactttttatcgcttgaaaaatgcgcaagaaggcaaccaatgtgcatgggaaactgtttctcctgataaaaacgaagtagttttatcaacagttaaggtcatggccagtgcacagccatactttactaaaacaaaattagttggtcttgacccgaataagcagtatgaagatcaggcaagccaccaagtatatggcggtgatgaattgatgaacctaggaatttatgatccggttgaacatggcgatttcatggcttatcggtatcactttaaagcaattaactgaggaaatttgtgatggcaattaagaacaaagtaatgttgattacttatcctgatagtttaggtaagaatctaaaagaattaaacgaagttttacataaagacttaaaaggcgcagttggtggcatccacttattgccattttttccatcaactggtgatcgtggctttgcgccaactgactacactactgtagatcctaagtttggcgattgggctgatgtcgaaaaattaggtgaagaatattacctgatgtttgactttatgattaatcatatttctcgtcattctaagtattatcaagattttcaaaaaaataaggatcaaagcccttatgctgatttattcctaagctgggacaagttttggcctgaaggccgtcctactcaagctgatgttgatttaatttataagcgtaaggaccgtgcgccttatcaggaaataacctttgccgatggtaccaaagagaagttatggaacacttttggacctgaacaaattgatttggatgttcgtcaaaaagtaactcaaaagtttatcaaagatactttaactagtttagtccaacatggcgcagacattattcgcttagatgcctttgcttatgcggttaagaagctagatacaaacgacttctttgtcgagccagaaatttgggatctacttaaagaggtgcaagctgatttggctggcgagggtgcaaccattttaccggaaattcatgagcattattcaatgccattcaagattgctaagcatggctactttatctatgattttgccttgccaatggtaactttgtattcactgtattctggcaagagcaatagtcttgccgcctggcttaagaaatgcccgatgaagcagtttactacgttggatacgcatgatgggattggtgtagttgatgctcgtgatattctctcccctgaagaaatcgactataccagtcaagagttatatgaagtcggcgctaatgtgaaaaagaagtattcaagtgctgagtatcataaccttgatatctatcaaattaatactactttttattctgctttaggcgatgatgatcagaaatacttcatggcgcggttattgcaagtctttgcgccagggatcccgcaagtttattatgtagggatgctggctggcaagaatgaccttgaattactggaaaaaactaaagaaggtcgcaacatcaaccggcattattacagccgtaaagaagtggctgaggaagttaagcgtccggtcgttagttcgctcttaaaattatttacgtttagaaacaatgaacctgcctttgatcttgatggttcaattgaagtctccactcctaatgaaaatgaaatccaaattattcgtaaaaataaagagcaaaccagccaagccgaattaaaagctaatttaaaagatttaacttataaagttgtagttaacggtcaagaagttaaattttgatcttttccccctctagatgaaaaattaaacaatattaatataaataagcaaccttgctcaattttagtaatggttgcttattttagtttcttgtgacttatcacaaaatatattagctttattcaaataaaaatcaaataatcttgttatgattaaaaagggaagaagggataaacgttgaatatttatgggaaatacgccccaactttagataaattacttgatcaaatgatgacgcaatttgagcagttaaataaaaattatgaaaaaggacatggagaacgtctctatgaacatttacgtggtcgggtaaaaagtgaagccagtatggaaggcaagtgcaaaagaaaagatttaccgttaacgccacaatcagctttgcgtgctaatcgagatagtgttggattgcgtgttgtctgcaattttattgacgatatttatacctgtattgactttattaagcagtgggataatgttaatgtttatcaggaaaaagattatattactaatgctaaaactaatgggtatcgttcatatcatatgatttttgacgtgactgtacctgatgaagatgttgacggcaatataccgggtcattattttgttgaagtgcaattaagaacaattgcgatggatacttgggctagcctggaacatgacatgaaatataaacaccagattaagaatcctgagatgattggcaatgaattaaagcgagtagcagatgaattagcttcttgtgatgtgtcgatgcaaacgattcggcagttaattagggaagaggattaatgagttaatgaagattttagtagcagaagatgaaccgcaactattgcgggttttaacagtggccatggaacacgcgggttatgatgtggatccggtagataatggcttaaaggcagtcgagcatgctaaagaaaattcttatgacgtaattatgctggatatcatgatgtcagtcatggatggaattacggctttgaaaaaattcgtgaaagtggcgataagacttatattttaatgttgacagctaaggccgaggttgatgaccgagtaactggtcttgatagtggtgctgatgattatctgactaagctattttcacttaaggaattgttagcgcggctgcgttcaaaagagcgccgtgaagatgactttactcctaataagttggaattaggggatgtaactttgaatgtgactaagcaggagttggctagtcataattcaattcgtttgagcgggactgaaactcaattgatgaattactttttgttaaatcaaaataaggaattatcaacagaagagttgcttaatcatgtttggaaaaatgatcttgatgccaatagcgaggtagtctggatctatgtttcatacttgcggcaaaaattgcaatcaattcaaagctcagttcgaattgaaggcgataaaggtggttcatataagctagttaagtaggtgagcagatgattcaaaaatttcggtggaagtttattggtacttctgttgctgccttgtttgtagttttgttgttgacgttaggcggcttagtttgggtgactcatgttcaaagccaaaatgaagtcgatcgcgtgctaacggctttggtcaaaaatgaagggcgtttgtcaccaaaaaatgccaaaccagcctttggcgatcaacatgatccaattaatcgcaattttttaggtgggcagtataatcccgaagcggtttatcagtatcgctattttgcggtaacaattgatgaaagccatcaggtacatgtaattaatgataataacgtttataaaattaataattccaagatacagactattaccagatcagctttagaaaatggtgataaaagtggtgtagttgccttaggacaaaatcaatatgcctttagggttgtaaaaaattctactggtgaaatgatgattgtttttttgaatgaaactctgatttttaaccgtttttggttattatttagagtagcgttagttttaggcttaggcgctttgattgtctttgctttagttttgattttagtttcgggcaaggcaattaagccaacgattgatgcttatcacaagcagcaggaatttattaccaatgccggtcatgaattaaaaacgccactagcagttatttccgcgaatacggaaatggaagaaatgctgggcaataattctgaatggaatgaaagcaataaagagcaggtggctaaactaactaagttaatcaatcggttgatttcgctggctcgagctggcgagacgggtgagcttaccttaagcaaagttagcttttcagaaatcgttgaagaaacgactaaagattttaaatcagtcatgaagaagaatgacttagtctaccaagtatcggtgcgggaaggcttaaatgttttagctgaaaagcatactttagccgaagtagttaatattttgctagataatgcgcaaaaatattgtgatcctcatggcaagattcaggtgaaactgactaagggcggaactttaagcaaatatgcggtcttgcgggtagaaaatacctatcgtgaaggtaaaggcaaagattacagccatttctttgatcgtttttatcgcgatgatgagtcgcataattctaagaaaggtggctttgggattggcctggctatggcgcaagagttagtcgaagcctttcatggcaaaattttagcccaccacaaaggtgaagacattgtttttactgttagtttaaaaattgctaaatgatcattctgtgatagttgtataattagagcagaattgggggatcattttggcgaagagaaaatcaatttataccaaagatgttgtcctagttatggcagcatctttcttttttatgtttagtacaatgtttgttaatcctttgatcaatggctatgccaaagaattaggcgctagcagtgcttttgcgggaatcattgttgggattatgagcttagccgccatgtttttgcggccggtagccggtaatttgactgataaattttctaaataccgcttatcatttattggcggcgttttgatttttatcggagtcatggggtatgttttgactctatcaagtggctggcttttgctttttcggctgattaacggtactggttatgtcctttgcacagtttgtatgactacttggctagcctttttagtgccgcgccaacacgttggtgaagcaatgggcttttatggcttaatgaatgctttggcaatggcgttagcaccagcagtttcaattaatatttatcaaaaaataggttatcgcacaagcttgctagcatcagctgtttctgctttattaatgattgtggccattcagtttgtgggtgatcatgctttgcctaaaaagcgagttcgaacgcagaagaagagtttcaaaattatccagtttaatgttttaccggtagcaattttgacaactttatttgctatcccgtattttgtaacacaggcagatattgtaacttatgtagaacaaaaacatctgactgtcgcagttgggtcatatttcttgatctatgcggttgttttgttgattattagagtaggactaaaaaggtattttgatacagtacgttttggcgtctggttttggctaagtctagtttcaacggctgcttatattatcttgctcgcaataatgaataatgattggcaaatggctttagcggcagctttaatggcatcaggctatgggatcatttattcagttttgcaatcaactgcgctgttgttagcaccgattgaagaacaaggcttagctagtgctaccttttatttgggactagacattgcgatggcctttggcccaatgatcagtggtgtaattgattctgctttaccgatagaatggttctatccagtagaattagtcttagttccattgattttagtagtttatttcatttggcgtaagcgtttgaatggcgcaattgaccatcattagagggaaaatatgagcgaatatgtagttaaatctaagttagaagataaagaatggcaaattgccaaccaagtacgtgatcatgtttttgtttgtgatgatgttaaacatgatgcaggtcccaacccagttgagtatctatgtagtagtgttaattcatgtattgtaatgtcggcagggatgattactaaagcacatcaacttgatgttaaaaattttagggtagaaaaccaggcaaaaacggagaatctcggtcatggtaaatcagtagtaactgagatgaagatcaaggtcttctttgattcggcaatgactagagccgagaaggaagaatttttagctcatactttgcatgtttcaactgtttatcaaactattaaagcagctgtcaaaatttatgtggaattaggaaaataagcgatgagcgagccatattacaaacaagaataccagggtgaaagaaagttagatggtgaggccccagtttttagttttgatcaaattatgaaagaaacttttctgcgaccatttatctggaatgcaagaactaccagaagaagtttctggattggaatcgttattactgaagttataatttggattggtggaattattacatttttggcaactgttatgccagtttctcactatgagaatgattcagctgatatgataaatggttttgcttttaatggtgatcacgcttcgatgattgtcattatcggtatgattatttggggcttgatctatctttatttgaaattatgccaattaggcctagccgtaagaagattgcatgatatcaattatacaggttggtggattctgttaatgctgataccgttaggttggatttttgttctgtattttgcaattcagccaagtaaacaagagccggtgaaatggggaacgtatctttaccttgacgaataataaaaaatgttataatttaactataagagattacgttaggagattatatcgatgaaaactaagaatttatttacttcattagctgccgcagtgatgctttcagctggtttagctggtgcaggtgtgtctgctgcagaaccagttcatgcagcaactacacaaacttcaagcaaaaaaggtaccattagtattaagcgtagatcagtatcagctacagttaataatgctaatcctaagctttacgctgtaaaccaagatggtaaaatcgtaaagtcaatggattcaaattatactaaaggtcaaaccatccagctttacttttctaacgaggctaagaacgatcaaggttctgttactttctattatgttgacagtcaaactgtagatggacaacaatgtgcaatttatgttgtttcgactgatgttaccccttcagcaacagttccaagtcaagcagactggtcaaagcaagcacaaagtgacaaaaaagccattcaagatgcttacaacaatagagcattaaagtacatcgttgtttcacctaagtcaaaaaagggtgcaaagatctactacgcatataagaagagtgctaaggctaaaaaggtttactttaaggcaaccaagaagaagatcaagtacggtaagaagtacaagtcatcgatgatcgttaaaaacggtaagagcagatatgcttatattggtaagaagagatacttaaagacctctactattaaagtagtaagtgttaagtacgcaccagttcaattatcagatgatttgaagaacttaattgttcaaaactagaaaaagttaataaaaattgtagcgtaaaggatgaattattgtcctttacgcttttttgatctaaaaattaataataataatattgataaaaaaactcactgacctacaatagactttgcgttatttttagggagttgtaaaaataagaatgaagagagtaaaagtctatttaggattagcttgtttgatgacgttattatgtttgaagccgcaaatggtttgggcgcgagaactaaatccatttcagactaagatgattaatccgcatacgtcttatagaatttatcaaaacttaactcgtaaaggtccgtcaagaagtctatgccttgctaatacgtttaaacatggcaatgttcaagccagtgcagttagaaaagttcgcggcaataagtattgctatgtttggttagacggacatagaggcggttgggtcaatcagcgagcttttttaagaagaaaaattgcagttgtacatcagattagtttagtgaagaattcgcattatagttttccaactagggatgcgattaattatgcaacagatgcagcaggaacgataattgagccaagtaaagttaaagtatctcgagcagaagtttcatcaagtaaaaaggaaagctatcgggtaagttattcttatggtaaagctcatgctcagacagttgttcaagtgagagctaatgctagagagggcattgttaaagcaaccaaaaaaccacaagctggagacagtgctcgtagctggttcaagcactataagacgtctggtaattggggcagaagttttgcgccggaaactaaatcgcatgttttaaaaagtgttcattttaaactgaaaacctatttctatcaacctgcgactttatgtcaaagtgattcggtaactgggacggtgggactagtaccagaaggattgaccgtgtcaaatggttcaatgtatgccacaatgtatcattcacctaatgatacgcgtgctcacattgtttcttacaaatttaatcaagtgcctaatcgctatactatgcaaaagttgccatggctaccttggtcacaatttctgcggcttgcatcccatgttaagataagcccatatattaaattgggacatggacaagcaatcggttcaactcgaaagtatatttatgtgattgctaataaccatttattgcgcaagagctctcaatcagaagaaattatgcagattagtaaaaacaatttgcaaattaaacagatttggacttttaaagtttggaatcattcagctagaacaggtcgttatttccataatgctacttttgtaaatgatcaccaatttattgccgtttaccatgatgccacagaccaccgttttgaatattgggaagttactcgtcagggtaatagttggtatcctaaagagattggcgctactagaggagattttatgcgcaatgattctcccgttcaaggaattacctatgacaagcataaaaaacagatttatttggcctttaatgattatttgtttaaattgaaacgctcaggtaaagtgctggctagaggtcactttcatacagggcgtgaatttgaggggattagcataaatggtcgtcatttatacgcagagctggcgcaaaggccagaattgttgaggcagaggataagataataggtgtaaaaatatgttatacccagataaattctatttaacacaagatttaaatagaagatttgccagaactaaccttgctcgactaatatttagtgatttgcattttgagaaaacaaatatttctttaattcaaacacaattagttgctgatgggttaaatatagagagggcttccgagataatctaaactacaaacaagaagaaaaatttttcgatgagttaatgaacaacgatacctcgactacagataaggcaatgacattgatgtatcataatatgcgtaatcaacttttttgggatggaaataaacgtaccgctaccttagcagccaacaagttaatgattgatcatggagcaggtttaattaatgccccacttgataagtgggatagatggaacaagctgatcagtcaatattatttaaccggcaaaatgaatatgttaaaagattggacctatgaaaatggcattcaaggagtagtgctgaataataattcagatttacctaaacctgatattaatccagaagattatgattaattacttaagcagaccgaacgggtccgcttttttataccaagacaacttttgaaaatattgctctaaaagttcataatagaaattgtttgtttatgttaaaggagttgttttattttttatgaagaataatgatcacagcaagataagtcgtagtagtctggtcttgatgattttttcttctatttttggatttagtaattctctgacagctttttaccaaatgggttattcaagtatcatttggtatattgtcaccgctattttattcttcttgccatcagccttaattttcgctgaatatggtgcttcctttaaaggaattaaaggtggaatcttttcatggcttgaaggatctactaatgaaaaagtagcatttattggaacttttatttggctatcagcttgggtgatttggttggtttcttcaccccaattcttcttggtttcagtttcaactgcaatttttggtcatgatacaacccaaagttggcatttaggaccattaacttcaacccaattattaggtgttttagaagttatttttttggcaattgttacattctgtgccgcaaagggaattgataaaataaaggcgattaataatattggtgggatctttactttaggaattgccattggttttacagcagtttcactttttgtctttattttgaatcgtgggcaattagctgaaccagtgaccgcacaaaatatggttcattcacctaatccagcatttcagtcaccgattgcggttatttcatttattgtctatgctttatttgcctatggtggtctggaaacaacctcaggagtaattgattcagttgataaaccggaaaagaattatcctaaggctctgattacggccatggtcttaatgacagcactttatgttgtaaacatctttatgtgtggggtggctgttaattggaacaaatcgttaggtggtaaaggtgttgacttagctaatgtcgaatatgttttgattaataatttaggtattgtcactggtcatagcctaggtctatcacattctacttcactggcaattggaactgtcttttctcgtttggccggaattgcggatgtgttatcaggaattgccgctgcctttttgatggtttattcaccgattaaatcatttattgaggggtgtgatccgcgactattgcctaagaaaatggttaagttaaataagcacaatatgcctgaattctcgatgtgggtacaagcaattgtggttagcgttattatcttatttatttcatttggtggtaatggagcacaacaattctatacaattttaatggatatgatgaatgtttcttcatcagcaccatatttatttttaattgctgcttacccattttttaaggctaaaaaagacttagatcggccatttgtttttattgaaggtaagaaaaaagtttgggcaacgacaattgttgtttggttagtggttgcggtcggaattatctttacttgtatcgaaccactctttaccggagactggcaaacttcattctggacggctattggtccagtggcctttggtgttattgcttggatttattacgcatataatgaacgaaaagaaaaagcaatggcttaatacgcaaaataagacgaaggattttgtccttcgtcttatttcttttctctattttttactttaagccagctactctgacaacatcacgttcaatcattaattcctcattagttggaataaccataccaacaatagttgagtcgggcttggtaataatggtggcattttctttattagcggctgaatcaggcttaaggcctaaaagttcgagtgaatccatgacatgttcacggacaccaaagtcgtgttcaccgacaccagctgtaaaggcgataccatctaggccacgcatttcaagggtataagcaccaatatagcgaatgattcgattaatgaaaatgtttctagctaagtcagcacgcttcttcttttgcccttcgagcttagtcatgtcaccacgtaaatcacgcatatctggtgaaatgcctgaaattcctaacaaaccagattcgttgtttagaaccttaagcatttgatcagcatcaagattttcctttttcatgacaaaagcaagtaaagaaggatcaacatcacctgaacgggaactcatcgtaatacccgccattggtgaaaagcccattgaagtatcgaatgatttaccatctttcacagcggtaactgaagcaccagatcctaagtgacaaacgattaatttcaagtcctttaagtcgcgtttcataatttcagcggctttttgactaacatatctaaccgaagtgccatgtgcgccatattttcttgcaccgtatttttcatagtatttatatggaagtgagtacaagtagtgcactggatccaaggtttggtggaatgaagtatcaaagacagcgacttcagggacgccaggcaatactttcatgaaggccttaatgacatcggcttcagcggtattatgaagcggcgtatattgtttcaaatcataaatcttttgtagtgacttttcatcaattaaggtggagtccttaaattcttcaccacccgcaacaattcgatgtccgattccgatgatttctttaggatcgtcaattaaatcatacttttttaaattttcaagcaagattgtaacggcagtttcggaatcaggaatgtcaactttttcttggtgtttttcacctttaaccttgattgtaaatgtggagccgttaagcccaactcgatcagccatcccttcgctgataactttttcatcaggaaaggtgaaaagcttaaatttaaaagaagagctacccgaattaatcgctaaaatttttttcataaattatgcctctttttcttaatttttgcagtacaacctatccagtaagggtatgcaataaagaaaatgccactaatctgctttaagtaagttcttgcagtaatagtgtcaacgtctttattatacaacttttgctgtaagctcttacagatatttttttattactaaaatttatatataaatttgattgatcatatataaatttagaatatcaatttgcaacaaaaccgcttacaaactataattaaattaatatacaataatatgttgagaggagaaaaacgaatgacccactactacgaaggctttccacaaagtgaccgcgatgaaaaaatcaagatggtgaatgtggatgaacttgaagaacgtgttaagaaggtaatgccagaaggtgcatattattatattgcttcgggtgcagaaaatgaatggacctggcgtaacaatactgctgcttttaatcattttcaagttgtacctcgtgctttgacggatatggctgatccacaaactaatactgattttatggggatgcacttaaagacgccaattatgatcgctccaattgcttgtcatggaattgcacataaagatgcggaagtcgcaacgcaaaagggtgctgctatggctggtgcgctctttagttctagtacttatgctaataagagtgtagaagaaattgcagctgcggctccggaagcaccaaggtttttccaactttatttgagtaaagactggaattttaatcagatggtttttgatgcaattaaaaaagctggttatcaaggaattttcttaactgttgatgctttggtatcaggttatcgtgaagcaaacttgcggactaactttacttatcctgtaccattggacttctttaagcgttaccttggtgcaaaaggtaaaggtcaaagcgtagctcaaatgtacgcttcttctgcgcaaaagattggtcctgaagatgttgaaagaattaagaaagaatcaggtttgccagtctttgttaaaggtgttatgtgtgctgaagatgcctataaagcaattggagccggtgctgatggaatttacgtaactaatcatggtggtcgtgaagttgatggtgctcctgctaccattgatgttttgccagaaattgcgcaagcagtaaatcatcgggtgccaattatctttgattcaggtgtccgtcgtggctctcatatctttaaagctttggctttgggtgctgacattgttggaatcggtcgtccatatctttatggtttagccttaggtggtgcgcatggagttgcttcagttattgaacaattaaatgctgaattaaagattgatatgcaattaacgggatgcaagacaattgatgatgttaagcatgctaaattgacgcacattgcttatactgctgataatttgccatctaatactgatccaagcagacgcaaggaatatccggtaactgacgaaaatcaagttaagcaaactgatgcggtatctggtgcttctaagttagaaggaaagccagctccggagccagaggctgataccacaactggtgcatcagtaagataaagcaaaaatataattaatattctcaatatgattgtcattgaataaatgatagtcatatttttttactatcaagaactcagcggctacaatcaaggtgaaagcgatttgatttttggagaggaaaattaaattattgaagagaataatgttttgactgatactgaagagcttaaaatcttgagtgatcttgttgcaataaaatccgttaatgataatgaaattttagtagcaaaatatttacaaaaactattaggagaacatggaattagttcacgtttgttggaatatttcacaactcgcgcagatttatttgctgaaatcggaacaggccatcccattttagcaatttgtggtcacatggatgttgtttcaccaggtgaattagatcaatggcatactgatccctttaaattaaccaataaggatggtaaattgtacggccgcggagcgactgatatgaagtctggtttagctgccttggttattgccatgattaatattcatgaacaccatttaattaagcatggtagtatcaggctgttagctacttttggcgaagaagttggtgaaccttctggctacagtattgccattgctcataagggttcgatggatattaagttaacttcccaaggcaaggaagctcatagctcaatgcctgaaaagggttataatgcgatcgatccattaatggatttattagttaaggccaacaaggcttttagagaaacagataaaaacaatccggacttaggtaagttgacgttcaatactactgtttttactggcggggaacaggtcaacatgattcccggagaggctaccgcgcaaattaatgtgcggactattcctgagttcaataatagtttggttgaaaagaaattaactgaattagttaaggcagaaaatgcgcaaggagctaaaatcaaaatggacatctatatgtcggagccttcaattaaaactgacggtaagtctgaatttgtaaaattagcccaaaaaattggagcaaaatatgcggaaaagccgattccaacagttgctattaaaccagtaactgatgcttcgaatttgattgccgacaaaggacctagctatccgtttgccatgtttggtcctggtaatgacacgccgcaccaagttaacgaatatgttgatgaaaagatgtatttgaactttgttaagatctatactgaattgtttgtggcctatttgaataaataatttggaaagtaataaaggtgtctgggaaaaaactagcttccagatgaataaaaacgatcaagatttccttttttaagaatcttgatcgtttttttgttctctttaaaatttttaacaataaaaatcggcccttcagccaccttctttgacaatatttgttcaaattcatcatcataaaggcaattccgatatcggtttcgaccttctctttacctcgcaggtgcgttctgcgcatgccaaatacgttcttcaaatgtccgaaaactggctctacatcatattttctcatgccatagatgtgtctgccttcttcgctttggagaacttcttttgctttttcttttaaatattgccagttaggattatagcgaacttggcgctggcggccgctagctgttttagccaattgttccaattctggcgttagctggaactcgtctgcctcataaaccttaagatcacggacctgaccagtagaacgatccttgcgctggctgtaatatttgaaatttaatctgacgccatgatgatcaatgtaataatcatctttttcattgtagtaccagttgattagcttagttggatcattcttatactttttggtctgttctttttcatacatagtgtagggaataaagtacttcttgtctggatatttttcctccagcatcggcgacgattttgtcaaacttgtccaacacggtcatttgatccaaaaccggctccaaagttttgaaatctgtcggattaggaaagatggcataatcaactacatattgatcggtcgtgactgcttgaatattgtagccaggctttaattgaccatttttcatgtggtcttccttcatatgcataaaggtggcgtcatgatctgttttggaataactgttgcgtccggcaaagatctcttcggcttcttcatatttttgcattcttggcacataatcttttcttagccggtgcagaatcttttttagtccacgtcgcttggcttttcgaggtgaaccgccaggaatggctttgttttcctgctcaatctctttagtcagcttgttaatttctgcttcagtttcttgagctaattcctttagcccctgactagtttgaactttttctttttccatttctttgactacttctttagtaatcaattcatcataaagttcaactgcctggcctttcagcttttcatgatactttttgcgccagacaaatgtatagcggttagcatcagcttcaatcttagtaccatcgataaaagcagcaccttcattgattaagccttcatcttctaacaggttagtgaagtagataaagctctttttaatcagttcattggcatggctgcttgatctaaaattattgatagtatgatatgaaatcttttgctggtcagccaagatcatcattggcagattttcttccagcatcaactcaatctttctgccagaaaaaactcttctggagtaagcaaaaagcagtattttgagcatcatggctgggtgataggctgggcggcccgttttagcagtcttgcctactaaaacatcttctggaattgaatctacaaaccagctgatgacattagccaaatgattggccggaatggcaaaatctagattaagtgttaaagcagtttgacctgtgatataattcttgtacatgttagtttccacctttttgtttttattttgtgatgatttaataatatcaaggctggagctaaaagtatacaaaaagagcgttgaaacaaaaattcaacgttcttttttcatgatctgagacttagttttttcccagacactttttattgtattttgaagtattttttagccgcatcactcatccgttcaggggtccaaacaggataccagacaaattctacatcaacatttttaacttcagggacttttttaacggctgttgtaatctgcttgatcaaataatcagtcaaaggacaggcaggtgtggttaatgtcatattgatgagacagatcccatcttgatcgaggtcaatttcataaatcagccccaagttgaccacatcgacgtttaattctgggtcaataacttgagctaaatgttcaataatatcgtttttaattgttttgctatcacgcattgtgttacctacgcatctttaccaaaaatttttgctttaattgcttgacctgttggtgtaccagctaaaccgccgattccagtttcacgcatagatgccggcatttgatgaccaactttcttcattgcttcaatacattcatcagctgggattacacttgtacatcccgctagcgccatatctgccgcgataagtgcattaccagcgccaataccatttcttttgacgcagggaacttcaaccaaaccggcaatcggatcacagactaacccaagcaagttagacatcgcaatcgataaagcttgggcactttgttcagcactgccaccggctacttcaactgccgcggcagcacccatggctgaggcactaccgacttctgcttgacagccgccagttgcccccgcaatttcggcattattggcaatcaccatgccaaaaccgccagcagtaaaaagaaagcgaatcatttgctcttcgctgagctgtaatcttttttctaataaaaatagaacgccaggtaaagttccggaagaaccagccgtcggggtagcgcagacaacgcccatcgctgcattgacttcgttagtggctatggcattttcaactgctgccatcattgtatcgcctgaaagtgtgtgtcctttctcgcgatattttttcagcttaattgcttcgccaccagttaagccagtttttgaaaagacaccgtttccagattcacctcttttaacggcagctcgcatagtttgcaagttatatttcatgcgctgccagactttttctcgtggcaagcctgatagttgacattcttgttcaataattaattcagaaataggtttgtgcgttttttctgctgcagcaacaatttccttaatatggttatacataatattgccctatgttataaacaaataatattctcaaattttttctttagttcttgcaataaatcaggatgaagataattttctacatcatattcataaatattatagtttttagtatgaaaaattcgtttgcgactaaagggtgctttttcgtgcaagagcgcggtaagctcttgttcaatgcgaatgtttttgtgtggatcaactaaaataataataggtaatgcaccagcaggttgaatctcggtattatgtaagacaattttgcgaatttcaattgcaccaccaccgatagagcatccagccaattccactttctttttatcattagacatatttaaaatagcagtattagggtgaccaattgggctaggaccatcttcttcaacaaaacgtaaatctacgccgcgctggcgtgcaatctcaggtgcctttggtacgcgtagatcgtctgagtcaaagcctaaaatacctgccgcaatagcatagtctgttccatgaccacggtgagtttgggcgaaagagtcgtaataatgaacggtaactttactcggggtaccgccaaaaagtttgtaaccagcgcgtccaatagcgacggctccggccgtatgtgaacttgatggtcccaccattacggggccaataatgtcaaaaacacttttataccgattagtcattttaatccctgctttgtaagttattctgtttttaattataacgaataataaagaagattaagaaagttttttgcaattttaaccgaagttttgtcataataatatgaaaagtgaaagaggttggttaaatgactaaagaaaaagcagaattaaaacaaagtttggagcatctagctgagcaaaagggcagccagcaggcagtttcttatcaagacttgtttacaccacaattgatgcaaaagtatactagttttgctactattgacttttttgtcagagaattgggcgtgaaagactttacgcaaattgagcagatggcgatagatcaagtcgatgaatttgttaaaaaagagaccaagtttgctagctgggacgaaatgcaacaaaaggcggttagcgagtacatgatgaagttattttagcaacaaaaagcgagttagtattaactttaaaactaactcgctcttttatttactatgttaggtgaatgacttgagcacctaattcatcaataaagcgctgatcatgttcaattactagcatagtaggatgatattttttaattaattgaataatttgttcttggttaaagacatctaaatagttcaaaggctcatcccaaagatacaaatttgctggttcaagtaaggacttggctaagtagacctttttttgttggcctgaagacatttgattaattgaattagtgaatatatcacgttcagtacctaatttgtgtaagatattgagaaaatcggcatagttaaggtggtgcttttgggcaaaatcttttaatgataggttattagattgttcaatctgtgataaataggagattgaaatcttatcagctgaatgcaatttgccagtaattgttccagcaaaagtattagtaattgccttaaacaaactagattttcctataccgtttttaccagtaatcacaatttggtgaccacgcattaaatcaaaggtagtaggttggaaaaggggaagcttgtcataagcaaggctaactcctttagcagtaattagatgtttatgatggtcggggacaaaattcatggctaggtcattgtctgcttcaatattttttaaaagaccctttctttcttcgatatttttatctaatcttgcttctacatttttggcaagtttcatttttttggcggctttgtgtcccatgaatcctttatcgtaaactgtacttctatgtcgaatatcgcctttcatcttggctcccgcatttttgttgctttcggaacgctgggcaaaagtttgcatcttttgttgactggcatggagatttttaatttgcctttctaactttgcattataagcgatattagattcatcttctaattctttttgtttttcataacgagtatagtttccttgttccagcctaattttttgcatttcaattgctagggtgtgatcgacaactttatctacaaaatttcggtcatggctgattacaattaatccctgttttttattatgcagatattgtgctacttgattccgtgtatcttcatcgaggtgattcgttggttcatctagtagggcaaaagaatgttgattaataaaacaaagcgccagtaaaatttttgtttgttcaccgccactaagtgttgaaaagggctgccaaatgatattttctttagcatgaagcagatttaattctcgttttaactcccattcctcgaaattaaactgttcttgtaaagcataaatagtaaggttatcgggattattaattacctgaggatagtaattgaattctaaatcactttgaatagttccttgatattcgacctgttttagcaacattttcataaaagtggttttgccgcgaccattacgaccgattaagccaagtttccaattagaatcgagatttaggtttaaattatcaaaaattttatcctgaccgtcataggcaaatgaaacgttttttagtgaaattgtagacataaaaaagcaccgtcctctcaaactgtgcttatgatctgagaaaatggtgcctgatagattagtccaagttggctaatctataattattcttaatttaaattaaagaaaatcacgcagactaatttctgatcacaagcaaaaagtacatccttaaactagtagaatgcattattttttacttaacgaaaatcagaaattaaaaacgcatcggcgtgagtcctcctattacttgaattgattaatctggcaatactttaccatcaaatataattatttgtcaatatttttatgataattcatttgcaagctgtgattaataaggagactgtaaaatagtttgtgtaaggatgaatgattccttaaatttatttctttaaacattagaaaaaggagttcctttctcgtatgattggtttgaacaaaaaaacacatacagaaagaagaactccttcatgaatgattttacccaaaatatggcacaagctctattcaatcaagacaaaataaacgatttattgcgcaaagaactccagcaagcagttaatgacttattagaggctgaactgactgcgtttttaggctatgatccttatgccagaaatggctggaatacaggcaattcacgcaatggtgcttattttcgcaaggttgatacgcaatttggcgagattgaaattcaggtgcctagggatcgaaacggcatgtttcatcagcacacgctccctgactacaagcagcactccaatgtcttggaaagcatgattatcaagctatattccaaaggcgtaaccactagagaaatagccgacttgattgaaaagatgtatggcagtcattacagcccagctcaggcatctaacatctccaagcagatgattccaaaagtcgaggcctatcatcagcgcaaactcagtgacaagttcttctgcgtttatttggacgctacctacattcctttgcgccgagaaacgtttgagcgtgaagcagtctatattgccattggcatcaagcctaatggtcacaaggaagtcatcgattaccgcattgctcccagcgaaaacgtcgagaattggacggaaatgcttcaagacatgaagtctcgcggtctagaacaggtttagctctttctttcagatggcgttgtgggcatgaagacagtgctggagcagacttatccgaaagctcattttcaacgctgtctagttcatgtcatgcgcaatatttgcgctaaagtatgcgtagatgatcgcgaaacgatcatgaatgaattcaagcaaattcatcaacagccaaataaggaagccgcgatcaaagtcttgcacgctttctatgacaagtggaacagagcgtacaaccatgtcatcagaaatctcaaagagattgaacctgatctgctagtcttttacagctatcctaagcagatcagggcttcaatttactctaccaatatgatcgaatcctttaacaacgttatcaagcgtaaagctaagcctaaagcagagtttccaactgaacagtcgcttaatacttttattggcattcaggcaatgagctacaatgaccgttatttcaatcgaatccacaaaggctttgatcaggttcaggataccttagaatcctactttgattaaataaaagattaaaaaatcaatctacgagaaaaatctatttacacaaaaaatttgacagtttcagattaaatttcttcactacttaattcaaacatattaataattgatttaaacatagataaaagttgtttaactattaaaaatgaattttgtgaatataatgttatcgataacagaaatcatttttatattgcaaatgaaagcgcatacgtttattgttgaatttgaaaaaacatgattttgtggaggaatttatttatgaataaaaagagtggtcataatatcaaatttaaatcaatttttgtatgtacttcagctattatgagtctttggttaggggcaaacttaactacgactcaagttcatgctgcagaggacaatgcagctcctaaaagttcagaagttgtaggccaaacgaattctagcaaagataatgcagctactgctactgtacaaaatcaaagtaacgcaaaagcaaagcagcgtcaacaaggtgtagctcctcaaaacgttcctacagttttggcagccaaaactaaagatgagggaacaaataactctccagcacgtgaggaagttaaagatcagactaaagtagttattcactacaatggtgatggtgaaaaatgggttccttatatttggggtaagaaacctaatggtaacggcaatgaatacaaatgggccggcaaagatgataatgggtattactcggttattgatttagataaaaaagtaggagttttaattaaaaccaaaggcagttgggctggtaaagacggtacaggtgctgatcgtagcttaaatgttagcgataatggcaaagcggaagtcttctataaagcaggtagtgatgatgcccaaaaggtaacaccagagtaccattccgcaaatataaatttgcattattacggtgatgaccaagttaataaggttaatgtttggacagataaggatcaagataataaacaacttattagcttaaccaaacaaggcaatagtcaagatggctcaatcaaattagacaatactgattttaataaactttttgttgcgccagttggttctgatgaaataacaagagaattcactccgttaccgggtaataaggcgacagatatttatttagttaaaaatgatacagaagcttattatagcaagagttttgccttagctgatcaaagtctatcttctgcatatatgacttcaccagatagtttgactgttgaagcaggtaaggctactactgtcgataaaattaaaggaaaacttagtctgcgaaataatagtattgatcatattgaagcagtcgatgctaatactgatggtaaagcaaagaaatttattattcataccaaagcagatattgatattttaaaggataaccaagttggactagggatgaactttaaaaatgttgatatcggtccttatgttcgttccaaagcttttgacgataaatatgcctatgatggtgacgatctaggctgcacctatgatagtaaaaagacgcaaattaaactctgggctccaactgctaaagaggttgaattgaatttatatgatagtgttgataatagtgccaagcctacgaatgttattgctttgacaagaggcgatagaggtgtttggactggtattattaagggcgataaaaaaggctgggcttatgattttaagttaacttttggtaatggcaaaataacacagactgatgatccatattctaaagccgttactgtcaatggcgttagaagtgtaattgaagactacaataatatcaaaccgacagattttaaccgaatgccttcattctctaagccaactgatgcaatcgtttatgaaacttcaattcgtgactttagtagtgatcctaactcaggaattaaagataaaggtaagttcttagggatgattgaatcaggtaagacaccaactggacaagttactggcttagactatctcaaggcattaggcatcactcatgttcaaattatgccttcatatgatttcgctagcattgatgaaactaagagtttaaagaatcaatacaactggggttacgatccaaagaattatgatgtgcctgaaggatcatattcttctgatccaactaatccaactgctagaattatcgaaatgaaagaaatgattaatggcctgcataaagctggtattagggtcattatggacgtggtatacaaccatgtttataatcctcaagagcaagcttttgaattaacagtgccaggatattatttccgttacgatgctgataataataccacaagtgatagtggctgcggtaatgacattggtagtcaacgtaaaatggttcgcaagtacattgttgactcagtagtttactgggctaagaactacaatctagatggcttccgttttgatatcatgtccttactagatcgagagactatgaatgatgttagagctgctctagataagattgatcctggtattattacttatggtgaaggctgggaagttggtaaccagaaatatactagagaagaaggaacgacccaatacactgcggataaagttcctaatgttggtttctttagtgatgatatgagaaactcggttaaaggtaatgatgatggctccgaaccaggattagtaattggtaacggtaatgaaagaaactttgataagcatgctgtcttgtttaccgatagttttttaagaggtaaatggttacataatgattcttgggagccacataactatgcaactccaagccaaatggttaattatgccgcttgtcatgatggtaagacgttgtatgattacatcaaggctgcaatgccaaatgaatcagatgagaatattgccaggagagtaagattggctaactcaatgatcatgctttcacagggtatttctttcttccactcaggtcaagaagcattaagaactaaaggtggcaattcaaattcatataattcaccagtaaatattaatgaaattaattgggaaagagttggtgctaataaagcatcagtccaatatttccaaaaattggctaaattacgtaaacagctgccaattttgcatttgaatgatttcaataagatttatgacgagaatgttactaaaattattagttatggtagagaaaccaaagataaaaacatcaagggtgtatttgagtacgaatataatgttaatggcaagaagttattaattgtctttaatgtcaacaatgataaagttgctctaaataatgttgatttatcacatggtaagaaattgttagatagtgatggcaatgtgaaattaagtgataaaactatgctggcaccattaagtacgcttgtagttgatgaagatggaacaatggttttaccagacgtgccaaaaccagatcaacctgtaagtccaaccactccaggtgataagccaggtaaaccaactacaccagaaaatccaaggattccggatcaaaagccagccaatccaattgttccgcaagaaacaattattacacctgaagctccaagtgaaaatagtattatagacaatactaaaaatataattaatggatcagaagagactactacagtttctactcaggataatacaaccactgaaatattattgacccataatgcttatgtgtatgacagtgaagcaaatcctatttatcaaaatgataacaagcttgtcttgaaagctggagatacaattaagcctttggataatggtaaaaagtatagtattaaaggtaagttgttctataaagtagctaaaaatcaatttgtcaaagttgctaatactgttagttactataagttagctcataactcattcgtttataataagcatggcaaagcagttaagaagaatggaaagcgcattttacttaagaagaataagcatatttcacttcattctgataaggtcgttaagattaaagggaagaaattctatcaattaaaagatggtagctttattaaggctagaaatgttaaaagaattggttagatttagatagttaattaaaaatattaaaaaacaagattgtttccaaaatgggcaatcctgtttttttaatcctgattaatcaagctaacgggcaaagtataaacactctccaatgataccgctggatcattaatttcgcaatctctttagtccgttgccgcgcactaattaaatgtgggaataggttctgaatcaattgtgtgccgtcaaatcctgtaattaacgattttttatttaaataatcgttgcattctttagccaataaagccgtaatgtcatccgtacaacaaatcgcatcgtaatcgttatctttcaaaaattgaaggatagcgattacgatgcgataattgattcacgggcgctaattgagcgtaaatcaaatttaacgtcaaaggtattacacacacacatcatccctttgatacgatcactgattggataatagtcttctttggaaccagcaataatgattactttcttctttttttgctttaaaaccgactttgcaatttgcatccccgcatcatagttattcgactgcacagtagggatctgcggactaattacccggtcaaaactaaccaccggtagattaagcttgccactcttctttgaaatctggattggcgagctggtaagtaagcctacgatctttttttgcttatatttatccaaataatactgcatatcttgctcttgataatgatctaaatgcaaaatgcaaaatgcaatcataacctttatcctgcaaaatagtagccaagtattcatacagttctgaatagaaaggattattgatttgcgaaaaattgatttcaattaagtttaattctgttttagcggaaattacattcttgggtttataacccagttttttgatagcttcctttatttttaaagccgaatcaatgccaacgtaaccattctgattaagatatcgcgaaacggtggcaatagaaacgccggcttttttagctatttctttaatagttactgccatgttttacacctttatatgtaaatcctacacactttctatcagtaagtatagcatattctaaaacctgaattgtcaaattaagtgcaacagttaggctatgaggaaatatattgcttaaagagttcttctgctgtgtgatattgaaggattcgacgatgtttgcggttaatggcatcagttgcctgttgaacataagcagctgacttatctttcatgcttttgcctttagggaagaattgacgcagaagtccattgcagttctcattggtgcctctttcccatggagaatatgggtgggcgaagtagatctggcagcctttgatcttggtcatatccgcaaactcagagccattgtcaaacgtgatcgatttaaaacaggcaggatgtctgtcaatctcattttgaagcagccttgggcatgtgcttgcccgatagtcaggaatcttgataactacttcaaagcgtgtggttctttcggtcaaagtcattaaagcaggctgattcttgcgtctgacgcctttaaccagatctccttcccaatgcagcggcgtttttctgtcttcaatctctttaggacgctgttcaatggaattgccaagatgcttcttgtgcaaagcgtgaccgccatggctgtgatgacgcttgttcctgcgtcttttgagcttcataggcagatcaatattgcttatgtccagcaagccctgatcaatatagcgatagacggttggtgtgctgggacaagggtagcctggcatagtccttttgaattcaccaacgaattcatcgatgctggtggcatcaaatttagctttaaagcgtccccaaaaagacagcataatgcttcaatggattgcgctgatagcagtttttgcgacgcttctcataataaagctgtgcagtatcagcgtaatagtgctcatacaataaatagctgctgtctctttgcaggacgcttccgcgtttgatttcgcgactgattgtcgacttatggcagccgacttcttgagcgataacagtacgggaagttatgccggaatccagcattgcttgaatttgtccacgttgtacgctggttaattgatgatagtgcttagaaatgctagaatttgaattggtcatgaagatcttcctttcttgatttttcgtcacttcaagtttaggtcttcatggcctttttgtttaacactcagtgttgcacttcaattttaaatccgggtccattattaattcctttcatagaaaactaaattccttttctaaaggggtcaagagctattatatacagttttctcagcagttacattcgcaaaaaagaaaaatgctaaatttatttaaaatatttagattttttatgcaataaggacaaatagctaggagaaagaacaaagaatatctccccatctattgatgtaacgctaaaacataatttactttctttcttttttgtgtatactaaatatacacaaaaaagaaagaggcgtacaactatgactgtaaaattaagaaaagttggaaattcaaaaactttaacagttcctaaagatataataattactagtaaagagtatactgtgaaaaatgaggggatgaatatagtttttacacccgtcgtgaagaaaaagaaaaatatttttgcaaccaaagaatggcaaaattatgattatcaaaaagacatagaaaatgacgtggaactacaatcagtaaaaccagtgggacgtgaggtagttgattaatgatttatccgaaaaagggagatattgttaaagcagatgcagaacctcattccggacatgaaatgggtggccataatccgcataaaggtaatattagaagacattatgtggtaatgagtaccagtgcctataataaatcaacacatatgtttatagggatgccgattactacttcagataaatatcaaggcaacccacattacgagccaatattaattccaggcagtaatggcactggagtaaaaggttatgttgttttatggcaacttcagaattttgactttgaatctagaaatggagaaattgttaatcacgtaaatattcagctattagacaaacttcaaggtttcgcgaatgatatggtgggactagaataggtaaaacaattatgccaattttaaggctagttcgattatgctgagaggacgattctgaggtcaagttcgactgcagaggttaaaatattaataatcatttaatgcaatagaatgctaattcttatttttatgggaaattagcattcttttttgtactttctaactatgtagaataatgagattttattctacatagtacatctaatcatgcattattctgctatgccaattttggggtgtgttgattatgtagtataattagctatagactaattattcaacatagagtgacgaaatacttgtatatcaaggactaatataaaaattgacagaaggagacgtaaattgaagcataaagatactcgtccaattactgatccaataattttaaagaagtttttgaaacatttacgtgaagatactagtatgggagaaagaaactatgctatatttcaaaccggtaaagcaaccttactacgggtaagtgatgttctagctttgaaaaagaatgatgtctttcaagccaatggcagagttaagaaaaatgcttatatcgttgacaaaaagacaaaaaagcctaaccgattatatttaactccagttagtgatgttttagaggattactatgattggctgcaagaatatgaaaagaagcatccctacacgaagctgttttcttctgaatggctatttccaagttctaggagattaggtgaggatgttccaataagagaaaatagtttttatagaatttgtcatcagaccgggcttaaaattggggttaattggattggctcacactcaatgagaaaaacaggagcttttatggtttatcagcagactaatcataatactgctttagttatgaaaatgctaaatcactccagtgaagcaatgactttaagatagagaccgtaaaatattttgtgtaaggatgaatatttccttaattttattttcctgaatattagaaaaaggaatccttttcccgtatgattgatttgaacgaaaaacatactagaaaagagattccttcatgaatgattttaccaaagatatggctaatgctctattcaatcaggataaaattaatgatttatttagacaaaagctccaacaggctgtcaatgacctgcttgaatccgaattgactgcctttttaggctacaatccttatgagcgcgatggctggaataccggaaattctagaaatggtgcttattaccgcaaggttgatacgcaattcggacaaatagaaatcaaagttcctagagacagaaacggtgagtttcatcaacacactatgccagattataaaaggcatactgatgttttagagcaaactgttatcaagctctattccaagggcgtcacaacccgagaaatcgctgatttgattgagaaaatgtatggcggctattattctccagctatggtttccaatatttctaaagaaatgattcccaaagttgaggcatatcatcagcgacatctgtcagataagttcttctgcgtttatctcgatgccacctatattcctcttaagcgggtcacttatgagcgcgaagcagtttatatcgccatcggtatcaaacctaatggtcataaagaagtgattgactactgtattgcgcctactgaaaatattgagatttggagcgaaatgctcaaaggcttcaagagtcgcggccttgaacaggtagagctcttcttgtctgacggagtagttggcatgaaagaggctatctgccagtcctatcctaaagcgcattttcaacgctgcttggtacacgtcatgcgtaatatcagtgccaaaatgcgggttgacgatcgaaaaaagcactggatgaattcaagcagattcatactcagtcaaacaaagaaatgactgtacaggtgctgcatgaattctatcaaaactgggaaaaagcctacaaaaacgtagttagagatcttagacaggttgagcctgatctgttaaccttttacaactattcgccagctattagagcttcaatttactcaactaacatgattgaatcctttaacaacaggcttaagcggaaaaccaagcctaaaacagaatttccaactgagcagtcgcttgacacctttattggagttcaggcaatggattacaatgaccgttactttaacaggattcataaaggatttgggcaagttcgagacaccctagaatcctattttgattaaaagataagtaagaaagtcaatcaacgagagagattatttacacaaacttcttgacagtctctaatgtcttaactgttaacttaggaaaatgtcctaattgtagtaagtatgacataatttcctttattggaggttatagttagagtgaataggattgatttaactatgaaatatgatgaacagtacaaagtcattaaggatcttgtagatcacaacggcaataagaaaagagcagccttgaagctaggaatatccgttagacaaataaacaggagaatcaagcagtatcaagctaaaggaaaagcggccttcgttcatgggaacaaagaccgcaaacctgttaattgtctcaccacagaaattaacaatcaaattgtaaccttataccgtactaaatatcaagactgcaatataaaacattttgtacagctgttagatcgctttgaggacattcatgtctcttataccaaagcttacagcctgctcaagcagcaggatattctttcccctaagccttggagaaagactaagcgtgccttagccaaaaagaaatggcataagcagcaccctaagcaaagcaaacaagaagtcagcgctgcagttgatcatcaactagctttggcagatgctcatcctcgccatgaaagatgcaagtacttcggcgaagaaattcagatggatgcttctgtcttagtctggtttggtaagcgtaaggcttacctgcaccttgcaatcgacaacgctactggcattattgtcggggcttattttgactgggaagagactttgaatggctactatcacgtctttgagcaaattcttaaggaatatggcattcccctttgctttaagactgataatcggactgtattcaattatgagactgctcaaaccaaagctgcccataaagatgtgctgacacaatttggctatgcctgcaaaactcttggcgtagatctaaaaactactagtgtttctcaagccaaaggcatggttgaaagagctaaccaaaccgtccaaggtcgccttaagccagaactaagattggctggaatcatgacaatcaacgaggcaaataaatacctgcatgatgtgtttgttcctgactttaaccaaaacttcagtcagactagtcgtaaagcctggtctgtttttgaaaaggctcctgatgaccgcaaaatcaattataccttggccgttctcactggcagagtgtttgatagcggctcagctatttctttcaaaaacaagctttatcaagcaacagatgaatatggcaaattagtctgcttcatgaaaggaactaaatgtctggtaattgaagccctagatggacaactgctaacgacagtagatgagcatgtatatctgcttaaataaattcctaagaatgccaaaatatcgccagaagtagaccaagagcctaaaaagaaaaggaccaagaaaaagtggattccaccaatgtcacatccatggaagcgagaatcattcataaagcaacaaaagagagctcataaataccatcaatacgtataaaaatagcggagagcaaattctccgctaataattaaataattttgggacattttcctaaattattgacatatttttatgataattcatttgcaagcgtaagtcctcgtaaattggttttccacctaaaatgtccagaatgtagtaagcaacgaaagtaacaataatcattggcaatacttgctggacagtcccaatcatttcagtcagtagcataattgctgtgaatggtgctttttctattgcaccaaaatatgcggccatggaaatcactaggatatgagggaagtacattggcaaaataatctgcaattttatcataatattggcgcaaattattcccaataatgccccaagaactaggataggcatgaaaataccatcaggtacggaagaatcatatgaaagcattgaaaagacaaaccgaattatcaagaataagatcggtagtaaaagaaagtcccatgatccaaaggctttgacattccaattcaaattgaataaattatcaattaacacatgtgaaccaccgagtaagtgggcattaaatagaccaactggaataattaaaattaaaggaatgatactgtgataggctgcagggatttttttaattttactgaaccatggctttagcgaaagtagtacatattgataaatgtatgccattattcccaaaaagataccaattaaaggtaaagcccagtatgcagtaacaggtaaataatcgttaacgggtaaataaaggaatggtttgtttccaaaggctagaatagtaacgaagtcagctgaaaaagtggcggccaagacggctactactttttgaggtttaaaatcaaaagtaatttcttcgaccaagaaaagtgcaccagctattggcgcgctaaaggcggcagccaatcctgcagccacaccgcattattgtagcgttctcaaattttccttgttagatttaaatactttttctgctaatccttgaccaaccattgcgcccatttcaatacaaggaccttcacgacctagcattaatccaggacagatagctaataagcctccaataaatttccgccaaagaatggaccaccatggcatcttattttcatttaaaagaacagcctcgatttgtggtacccctgagccaattacttgttcaaggtaaggcgcagttattttacctaatgttattgcaataatgaacatcaataagatgtagggtacgatcagtactcgctgggctgccatttgcggataaatttgataaagcaacttcatagtttgatcaataatccagcgaaatgcgctaactataactccagtagttagcccaactgaaattgcttgaaccaaagttttagtcatgttggttgaaaaaaggttttgctaaaatctgttttgcatttttaatcattacatttccccatattacagacgatacatcctttttatcctaacaaaatatagcaaaaaaggcatttatgtttttgatgaatgatcttatttttgtaaaaattgttgttcccaatcatagacattttttatatgcttctttaaagcgttagaggctaacaaaatatcttttttctcaactgcagaaataatatccattatttcctgaaccgaggatttcatacaacgatcattgtctacgatggcataacgcatacgattggtttgagtacgtaaaagatcgatggttcgctgaagcgtgggatttccggtattttcagttaaaaatacatggaatagttcatcaagtttaagataagcttgccaatcatgttttgctaaaatttcttggaattttattccataatcattagccagttgtggatctaaattgggaaaatttttttccaaggcataactctctaatagagaacgtaaatcataattgtcttttaattcagctaatgtaatatggctaacgatttttttgtccttgacgaactagtaagccttcattttccaattgtttgattgcttctctaattggagtacgagacatgttaagtttaatacgcgtttgattttctgataaaagatgacctggcttaaaatgaccagtgtttatttgatctttgataaaaagatatgctttttcttgattattcatttggttctcctaactaagataattttacaacttttttattttttatattatttgcaactaataaaactaaaaacttgtatacaggttatctgtggtaaatcgttgacttacaaaatataagttttactatgtaattgtaagttaaattttgatagaaatgaggaaagaaaaatgactaaaattgcagtacttggtgcaagtggacaaattgctaaattagcagaaaatttatttttggaagataaaaataatgaattaattttatttttacgccatcctaataaattggataaaaaagatatcgatgatcaacgtgaaaggattgtcgtaggggatgcaagtaaattggatgaacttgctccggctattaaaggcgcagatatcgtttatgctaatttagctggttcaaatattgaagatcaagctaagacagttgttaaagctatggatgaagatggtattaagcgtttgatttggatttcctcgttaggagtctatgatgaggtaccaggcaaatttggtgaatggaacaagaatattttaggttcatatttgaccacttatcgtgcagctgctgatcaaattactgctagcgatttggattacacgattattcgtccagcttggttgaccaataaagatgaagttgactatgaaataactgaaggcgcaactaccccatttaaaggaactgaggtctctcgtctaagtgtggctagttatgtaaatgaaatagttaaagaccaaagtaaagacagtcgtggtaatgttggtttaaataaaccaaataccgacggtgataagccagcttggtattaaaacaaaaaaataaagaccagcttcaaactgaaactggtctttattttggcttaattatttttcgaattgtttgccccaagcccatggatcttcgtgccaggtctttaagacatcatattgcgtgctagaaatatgacctgactcattttcctttttgagtaattcagggtaggaaagaagcggagcatatttaacattagctttagcaaagttttcttttgcatccggtaggtagtaggtgaaaattgaagaaacgccaatgacgttgccaccatctttttcagttgctttaactgcatttaaaacggaaccaccagtggtgattaagtcatcaattaaaacgatcttatcatctttactgaaacggccttcgatttggcggcctttgccatgatcctttggcttaggacgaacatagatcattggtaagtgcagtttatctgcaacccatgcggcatggggaataccggcggtagcgacgccaccaataatagtagcctcagggaattctttggcgattaaattagctaaatcaccagcaatcatatcgcgtaattctggatatgaaaccgttaacctaaggtcggtgtaaattggagaaagcatcccacttgcgtaagtgaatggtttgtcaggtgagatagtgataattttttcttgaataagttgactgataatttgatccttatgcattttagttaaactcctttttaattgcttcatatgcagcttctgggtcactggctaaagtaattggccgtccaacaacaatagcgcttgagccccattctttggcttgcgctggtgtggccacgcgagattgatcgtctttagcattgccagcaggccgaattcccggtgtgacatataaaaagtcatcgccaactttttcgtgtaattcttttacttcaagtggtgaacaaataaccccatctgctccagagtgcttagccatttttgctagcgaaagaacttgctctttcattgacagtgcgcaattttgttcatgtgccaatacttcatcagaaatcgaagttaattcggttactgctagtaacttaggcacgcttttgccaacaggtgtacccgcgattaaaccgtctttagctgatttgatcatttgactgccgcctaaagcatgaacggtagtaaaagtaattcctaacttagctaattgtttagccccgttataaacggtattagggatatcatgcaattttagatccaagaaaatcttataaccttgctcagctaagtctttaaccacttggttgccagcgtgatagaataattccataccgactttgataaagacgttttctggtttgcctaatttagacaaaatcttatgcagttgctcttcattgtcaatatctaatgcaacaattacaggtttcatttttcctccacaaaaaaagtctatcttagcgcagagagacaccaaggatagacttttcctagataatttaagtcaatattttgaacttgcggtctctctgtaccgtttaaagtttgatcaaggtgaagtttaacacctcaaaagtaaaaatacaaataaaatttttgcttggaaaaaattataatcacgtgtagaatcatttcttgaaaaaataaagagtgtccgtgagcattcattttggaggaaaattatggttaatacacatgtaaaattaccaggtttagatttgaaaaatccagttatgccagcaagtggaacttttggcttcggcgatgtgcctgcagctaagaagtttgacttaaatgatcttggagcaatggttattaagacaactacgccacatgcaaccacaggtaatccgcaaccacagattgccgttttagatgatggggttttgaattcggttggtcttactaatcctggtgtgaacaaggtgattagtgaaaagttagaaccattgagaaagcaatatccagaattaccgatcgtggctagcgttggcggtgatagtgaagcagattatgttgaagtagcacaaaagctgtcaaattccggcttggttaatgctttagaaattaatgtttcttgtcctaatgtggcccaaggtggaatgagctttggcgtgcatgccgatgtggttgaagaattgactagaaaaattaaagcagttgtcaatattccaatttatgtgaagttaacaccaaatgtgactgatatcactgtaattgctaaagctgccgaaaagggtggtgccgatggcttatcgatgatcaatacattgctagggatgcgaattgacgtgaaaaaacgcagaccactgttaggccataatatgggcggtttatcaggtgaggctgttaagccaatagctattagaatgattagtcaagtgcgtcaaattacttctttgccaattattggcatgggtggcattgcttcggccgaagatgtggtggaatttatgttagcaggtgctaatgccgtagcggttggtactgctcattttaaagatagtattgcttctaagcatattgcagatgccttgccgcaagaacttgaaaaattaggcattgaagatatcaatgaattagttggtcaagtaaaatttaattagagcttgacaaacgtttctaattacagtaactttaaagcaatgaatgtcctttaaaattagtcccgtgaggctagcgaggcaggcttaacttaagtttcgactttactaaagctcctagtctcagttgagattgggagcttttttcatgggcagaattaggaggctataatggcaaaagaaatctgggatgcactagcaatgaagcgtgctttaacccgtattacttacgagatcattgaacaaaataaaggaaccgatgatttggttttggtagggattaaaacgcgaggcgtttacttggctaaacgaattcatgaccgtattcagaaattggaaggcgttgatgtaccagttggtgaattggacattaccttatatcgggatgatcgtcatgatgctagtttaaagcaagatccagttgtcaattctgatcaagttggtgttaatattgatgacaagcatgttgttttgattgatgatgttatctatactggacgaacaatcagagcggcgatggatgctttgatgcacgttggtcgcccaagttcaatcagagtcgcagtgctagttgatcgtggtcaccgtgaattgccaattcgtgctgattttgttggtaaaaatattccaacttctgccgatgaacaggttgctgttaatgtaattgagaaggacggcaaagattcagttgaactgaaggctttaccaaaataaaaagaagatagttaaatatccaaccatttaattgactccagagagggccagaagggttgatttcttttcgtgtacacgggaagactctaggcctggagcaattaaatgcttcaggcttttttgtatagaaagaatagaaaatggaaaatttaaatcttgttaatttaccacattttgtgagtgttgaaaatttggatagtaatgaagtagaagccttaatcaggagagctgagtacttcaaaaaaggcggtgcaacaccacgtttaactaagccagtttatgtaactaatatgttttttgaagattcatctagaacacatacgagctttgaaatggctgaaagaaaactaggtttgacagttattccttttgatccggctcattcgtctgttaataagggtgaaaccttatatgacacttcattaattatgaacgccttaggtgtcaacttagaagtgattcgtcactcacagaatgagtattacaatgatttgattaacttaaaagaacatcaacatttaaatattggtgtgattaacgctggagatggtagcggtcaacatcctagccaatgtatgctcgatatgatgactattcatgaacattttggccactttaaaggcttaaaggttgcaattgttggtgatattactaattctagggttgcaaaaagtgacatggaacttttgactaggttgggcgctgaagtttacttctcaggtccaagttactggtatgataaagaattcgatcaatatggtaagtatgaagaaattgatcaattagtttcaaatatggacgtgatgatgctcttacgggttcaacatgaacgtcatgcaggcgatcctaatgaaaagacttttaatgctaaagcatatcacgaaaaatatggtattaatcagcaacgctatagtgcattgaagcccgacaccatcatcatgcatccgggtccaattaaccatgatgttgaacttagcggtgatttagttgaaagcgataagtgcatgtttgtcagacaaatgcaaaatggtgtgttcatgcgtatggcaatgatcgaggcagtattgcgcggtagacgacttggaggattagaataatggcaacagtaattaagaatggcacagtttatcaaaatggtcgtctaattaaagcagatgttttaattgaagatcaaaagattaaagcaatagggactaacttaacggcagataaagagattgatgcaagtggcaagctagttagtcctggactggttgatgtccacgttcattatcgtgatcccggacaaacttacaaggaagatattaaaaccggtagtgaagccgctgctcatggtggttttactatggtaggggcaatgcctaatgtaacgcctgtacctaatacgcctgagctaatgcaaaaaatggtacaagaaaacaatgaaaaaggtgtggttcatatttttcaatatggaccaatcactaatgatgaaactactgatgtcattcctgattatgcagcattgaaaaaggctggtgcttttgccttaagtaatgatggtcatggagtccaaactgctcaaacgatgtatttggcaatgcaaaaagccaaggaaaataatttgatcattgctactcatgcacaagacgattcgctttttaataaagggatcgtgaatgaaggacctaaagccaaggaattaaacttgccgccagtaactgaattagcagaaacaacgcaaattgctagagacttgcttttagcacaaaaaacgggcgtccattatcatatttgccatgtatcaactaaaactagtgtggaactggttcgaatggctaaggcgcgtggaatcaatgttacctgtgaagtagcgccacaccatattttattaacagatgacgatattcctaaggacaacggttattataagatgaatccgccattgagaaataaggaagatcaagcggcgttactagtgggactactagacggtacaatcgatttaattgcgactgaccatgctcctcatgctcgcaatgaaaaagaaggtggcatgaagggcgcagcatttggtattactggtagtgaaacagcattttctactttatatactaaatttgtcaaagaagaaaaagtcttcaccttggagcagcttttatcatggctctccgataaaccagctaaaacgtttggcttaaaaaatgccggggtacttgaaccaggtaagccagctgatattgcgatttttgacttagaccatgaaactgaattaaaagaagaagactataagtcaaaaggcgttaatacaccatttacgggcgacaaggtgtatggtgaaactgtaatgaccatggttgatggtcaggttgtatacagaagggatgaacaataatgcggtatttaatcctagaagatggtagcatctatgctggcgagggttttggcgctgattgcgaaacagttggtgaagttgtatttacaacagggatgactggttatcaagaagcaattaccgaccaatcttatgccgatcagattttggttttcactaatcctttaattggaaactatggtattaccttggcagattatgagtcacttgagccaaggatcaaaggcgtaatttgtcaccaggttgcccgtcatcctgataattggcgaatgcagacaaccttaccaaagtttttggagcatttgaacattccaggtattcagggaattgacacgcgtgaattagttaaaaaattgagagttcacggtacattacgtggtaagattgcagattcaaaagaaaatgcagaaaaaattgcggcagaattaaagattaagaatgtaactcaaggtgtaattagccgagtatcaaccaagtcaccatatccagttcctggttcgaaacgcaatattgtggttatcgactttggaattaaacacagtattttgcgtgaactagcagaacgtgattgtaattgtattgttttaccatatacagctactgcccaagaagtattaaaccttcatccagatggtgttcttttgagtaacggccctggtgatccagaagaaatggtagaggcaactaaaatggtgcgtgaagtagaaaagcatgttcctttgatgggaatttgtatgggacaccaagtctttgctttagctaatggggctaaaacttacaagatgaaatttgggcaccgcggttttaatcaccctgtacgagagattgcaactggtaatattggttttacttcacaaaaccatggttatgctgtgtctgcagattcaattgacaaggataacttaatgattacccacgttgaagtcaatgatgggacggttgaagggttacgtcataagaaatatcctgcattttcagtgcaatttcaccctgatgcaacaccgggtcctcatgatgaggtttcgttattcgacgactttatgtcaatgattgatcagagaaaggaagaagagcgtcatgcctaaaagaacagatattcataagattatggtgattggctcaggtccaattattattggtcaagctgcagaatttgattattctggtacacaggcatgcttggctctgcgcgaagaaggctatgaagtagttttagttaattccaacccagctacgatcatgactgatacaacaattgcagataaggtgtacattgaacctctgacagttgaatcgatttcacgaattattcgtcaagaatatcctgatgctattttgccaacacttggcggtcaagtgggcttaaacatggctatggaacttgccaaaacaggaattttggatgaattacacatcgagcttctaggtactaagctgcaatctattgaacaagccgaagaccgtgaaaaatttaaggaattatgtaagtcattaggtgaaccagttccaccttctaagacagttaatacagtcgaagatgccttagctttgggagatgagattggctatccgatcattgttcgtcctgcctttacgatgggtggtaccggtggtggtatctgtaataatcatgaagaattagcagagattgccaaaaatggattggaactttcccctgtaactgaatgtttgattgaaaaatcaattgcgggctataaagaagtagaatttgaagtaatgcgcgaccatgatgacaatgcaatgattgtctgctgcatggaaaactttgatccggtagggattcacactggtgattcaattgtcttttcaccaagtcaaactttatctgataaggaatatcagatgcttcgtgattgttcactgcgtttgattagggctttgaaaattgaagggggatgcaacgttcaacttgctcttgacccaaatagctttaattatgatgtaattgaagtaaatccgcgtgtttcaagatcatctgctttagcttctaaggcaactggttatccaattgctaagatggctgctaaaattgcagtaggaatgactttggatgaaattaagaacccagtaacgggaacaacctatgcagaatttgaacctgcattagactatgtagtctgcaagataccacgctggccatttgataagttccctaaggctgatcgcgttttgggcacccaaatgaaagcaaccggtgaagttatggcaattggccgtactgcagaagaagctatacaaaaagcggtaagatcactagaaattgatgaaaaagatctttactcaccagaagcacacgtagctagtgatgaccaattagagcaaaaattagtcaaagctcaagatgatcgtctcttctatttagctgaggcatttagacgtggttattcagctgaagatgttcatgaattaacgaagattaatttctactttttagatatcgtgcaacatatggtcgaattggaaaagacacttgaggaaaataaagatgatgttgatgtattgcgcttagctaagaaatatggctttagtgatccaacgattgcctctttgtggaatgaaactgcagatgaggtaagagcatttcgggaaaagcatggcatcatcccagtctacaagatggttgatacatgtgctgctgagtttgaatcaaagacaccatacttttattcaacttatgatgctgaaaatgaatcacataagactggtaagaagtcggtgatcgttattggctcaggtccaatcagaatcggtcaaggtgttgaattcgattatgcgactgttcactgtgtcaaggccttgcaaaagatgggctacgaagcaattgttatcaattctaatcctgaaactgtttcaactgacttctctatctcagataaattatactttgaaccattaactttggaagatgtcttgaatgtctgcgacttggaaaagccagaaggcgtgattgttcaatttggtggtcaaacctcaatcaatttggctcatggcttagaagaacatggagtcaagattttaggcactaaagtagctgatgttaaccgtgcagaagaccgtgaactgtttgatcaaatcattaagcaacttcatttgaatcagcctcaaggtttaactgcaactactcatgaaggcgtacttgaagctgctgataagctaggctatccagttttagtccgtccaagttatgttttgggtggtaaggcgatggaaattgtctacaccaaggcagagttagaagaatacttgcaagaccacgttgatattgcagcagaccacccaatcttggttgatgattatcttgatggtcgtgaatgtgatgttgatgcaattagtgatggtaaggaagttcttttgccaggaatcatggaacatattgagcatgccggtgtccactctggtgactcaatggctgtttatccaccacaaaccttctctgatgaagttaaagaaaagattactgatgtcactagaaagcttgctttgactttgaactgtgtcggcattatgaacattcaattcattgtcagagatggtgaagtttacgtaattgaagttaaccctcgggcaagtagaacagtgccatttttaagcaagatcacgggtattgaaatggctcaggtcgctacccgagtaattatgggcgaaagtttggctgaacagggctacggtgatggtcttgccccagagccagacatgatctctgttaaagcaccagtcttctccttcagcaaattatcggacgttgatgcatatcttgggccagaaatgaaatcgacaggtgaagtaatggggagtgatcacacttttgccaaagctctctacaaagcttttgcaggtgctaagatgcaattgcctgaaaatggtaatgtattacttaccatcgaagatcgagacaaagaaaagattttaccaattgccaagagatttgcgcggattggctacagaatctttgctactaagggtacagctgatttcttgcgcagtcatgatttgcatgttgatccagtaactaaagtgcatgaagatgaagacgccaaggataatatcttgaatgaattaagaaatggcaagattgacttggttatcaatacgatggggcacgatattgaaaagaattctgatggcttcatcattagacaggttgccattggtcaaaatgtaccattgattacagcacttgatactgcagatgctttgcttactagcttggagaatagatcatttgctactgatgctttgaagtaggatggttgaatagataaaaataatgcatttctctattgaagtaggagaatgcattattttttatgcaaaaaataattttccctgaattgtcaaattaagtgcaacagttaggttatgaagagatatattgcttgaagagttcctctgctgtgtgatattggaggattcggcgatatttgtggttaatggcatcagttgcctgttgaacataagcttttgacttgtctttcatgctcttgcccttagggaagaattgacgcaaaagaccattgcagttctcattggtgcccctttcccatggagaatatgggtgagcaaagtaaatctggcagcccttgatcttggtcatatccgcaaactcagagccattgtcaaacgtgattgatttaaaccaggcaggatgtctgtcaatctccttttgaagcagcctttggcatgtgcttgcccgatagtcaggaatcttgataactacttcaaagcgtgtggttctttcagtcaaagtcattaaagcaggctgattcttgcgtctgacgcctttaaccagatctccttcccagtgcagcggagcttttctgtcttcaacctccttaggacgctgttcaatggaattgccaagatgcttcttgtgcaaagcgtgaccgccatggctgtgatgacgcttgttcctgcgtcttttgagcttcataggcagatcaatattgcttatgtccagcaagccctgatcaatatagcgatagacggttggtgtgctgggacaagggtagcctggcatagtccttttgaattcaccaacgaactcatcgatgctggtggcatcaaatttagctttaaagcgtctggagagcattctcaaaaagacagcataatgcttcaatggattgcgctgatagcagtttttgcgacgcttctcataataaatctgtgcagtatcagcgtaatagtgctcatacaataaatagctgctgtctctttgcaggacgcttccgcgtttgatttcgcgactgattgtcgacttatggcagccaacttcttgagcgataacagtacgggaagttatgccggaatccagcattgcttgaatttgtccacgttgtacgctggttaattgatgatagtgcttagaaatgctagaatttgaattggtcatgaagatcttcctttcttgatttttcgtcacttcaagtttaggtcttcatggcctttttgtttaacacttagtgttgcacttcaattttaaatccgggaaaaaataattttcacaagtgaactaataattctgagataaataagcgatagatagcattcaatcaagatattgtgaaaaaatatgtatcacaaactttattatagagccatgagtaagaatatttcactatcttttgtaagcgaatacatttataatctgagataaggaagtgaagtgtttaggggaaaataaaaatgtggatttcgtttttattggctttaattccaattatttggcttatttactctttggcaattcgaaaaacgcctgctattaaagcatgcagcattggactattaattactatcgtattggctatactgggatttaacctctctatagttgacactttgacgggtgctttagagggcattctgatggggctatggccaattgtttatgtaatcgtggctgcactgtttacttataatgtaagcaattattcaggtggaattaaaattattcaagatactttgtcgtcaatcactactgatcagcgtattttagttttgattatcgcatggggatttggcggattcttagaagcaattgcaggttttgggacagcagttgcaattcccgctgggatattaattggatttggtcttaatccgattaatgccgccataatttgtttaattgctaatactacaccaactgcctttggtgcaattggattaccagtgattacactgagtgacgtaactaatttgcccgttactccattatcatttgttattactttacaacttgcattattaattattataattccgtttttattggtgattctaacagatggcggagttaaagctatcaaaggagtgggattaattaccctgatgtctggtttgtcattttcaattccgcaaattttggtagcaaaatttgttggtccagagttaccagcaattgttggttcaatttgttgtattttgactacagttctgatggcaaaattatatcatcatcaagataatgacataaaagagaatattgagaagcacagcgctatcgaaattttgcgtgcaagtttaccatttattttagtgttcgtatttgtggttcttgcttcatcactgtttccagatattcagcatctattgggaaaggtgacgtcttatattaaggtgtatactgggaaagatgcagaactgtttaagattaattggctttcttcaccaggaacattaattttgctagctacttttattggtggattaattcaaaaagttagtttcaagaaattaggacaaatcttaaaatcaacaatttttggattatggaaaacattaattacaatttgttctattgtggctttggccaaggtaatgggctacgcaggaatgacttcagcaattgcggcagcattagtagttctaatgggaccaatatatccattagttgcaccgttaattggtgctttgggtacgtttattacaggatctgatacctcagctaatgttctttttggtaacctgcaattgtcttcagctaaggctttaggcgtaaatagtaattgggtagttggttcaaatatggtgggagcaactgctggaaagatgatctcacctcagagtatagctgttgcttcagctgcaattggacaagatggatctgaatcaataattttgaagcaagtggctaaatggtgcttattgtatttgggaataatttgtatattcctatatggaataggctttgccgtaggatttttataaaaataatttaaataactcttggtgttctgatatatattgatttgcacttgtcatccattaatagtaaatcgcttgcattaaaagcgctttcgttgatagaatgctttttgtaacttttttacattaataagggagacaaaacgaatgagttatttatttctgttcattccggcaataggatggggtcttatgcccatgtttgttgctggtgtcaagaagagtaacatttaccaccaaattttaggtaccgttcttggtgcatttatctttggtgctgcagttactctcattaagcgtccatcttttaatgcgactacttttattttagcaatgttagctggtgctgcttgggttattggtcaagttggtcagtattacagttattccaaggttggggtttctgaaactatgccaatttcaactggtttgcagttgatcggtgtgccacttgtaggtgtgttgatctttggtgaatgggcaagcactcaagctaaattgtttggatttttagggatcttagctttagttattggtgtagcatttacatcattgactgacaaaggtacatctgaaggtggaaaaaagaatcagaccactacaatgattgtgctggtattgactacacttggttacattacttcaagttccattccaaaggccttgaagggtgacagcataatgattttctttgctgaaaccattggaatgttggttgcagcaattgtttatttaattgcaactaagcaaacacaagtctttaaggaaaaagaaagttatcaagtaattcctgccggtgtgatttacgcaattgctgctcttgcatacattgtttcagttaagatgaacggtgtaaacctagcctttgttatgtcacaactttgtgttgttatttctactcttggtggtatccttttcttacacgaaaagaagacacaaaagggtcttgtctatactgtgatcggtttaatattaattgttgccggtgcagttttgacctcagtattttaatgaattttaaataaatattgaatgaactccaacatgataattgttggagtttttgagtaaaaaaattcatgaataaatataaaatgaattaaaatataagtagaagccaaagagaggatgatttctatgagtgataatacagtatacgtgatcgacggtcgtcggtatgcacgtaatggagaaattgtcgaacataatgtgcatgtttatagttcttatcaaaatctgattgctgcatttaagccatttttggaagtttcaaataaagaagtgcatatgaatggcaaaaatgagatgcttcaggttagaatatatgatccatcaaatcaatttttgacaaaatataaatttgatatttatgaaaagaaaatagataatttctttccaagtactactgaacatatttagcaaaggaatgatccgatgacttttaacaaagaagaaaaagagcaagctttaaagcggctaactgatgaggaatataacgtaactcaaaaggccgctacagaatatccttttaccggaaaatatgatgatttttatgaaaaggggatttacgttgatgtagtgtcaggtgagccacttttttcaagcttagataagtataatgcaggctgtggttggcctagttttactaagccaattaagaaattaacttaccaccgcgatcaatcgcacggaatggagagaacagaagttaaaagtcccgaagctgattctcacttaggtcatgtttttactgacggcccagtggatcaaggtggtttacgttactgcattaattccgcagcattgagatttattccatatgatcagttggaacaggctggctatggtgaatataagaaaatatttgaataaaaaatacggcagatacttaaaataaatatctgccgtattagtttatatattaaaaattatttctcatagaacttaatttcagtattggccaaatcaactgtataagtttcttcttcaagtggtcgtttagtcattccttcatcagttgagtagatgatcaaggccaacttactaccagatggaagagtgtagtaggtaggttgaagcaagaagtctaaatcgtagaacttgtcagcatcaatcttctcaggtcttttcatgtccttatagttttgtaagttcatgtgagccttagtgatcaacttagccttagtcttcttgtccggcacaaattcttgcaaagtatcagtgccaaatctatagccaagttcttgaccgccgcgcattaagaacttaggtgtagcggttaagcgtcttctttctcccaattcaactaaagcaacagaaatttgtcccttaggtaagctgcctttaactctaacttttacttcaggacgaccgaaaatcgtagttgggtgaataaattcgtctgtttcaaaacgcaaacttggtttagcccatttttcatcaccacagatgaacttgtatagccagtcgctttctgagatgtcagccttcttaaattcaatgccaccttcatcgacaaatgattgttgtgctttgccattgccatcttggaaaagctcgccgtcatcagttgggtagtaggttttcttttgacctaattcatttgaccaatccttttcttcgtgccacttgtcagcttgcaagttgtcctggatcatgacggttggccattgcttgtaagcattgttttcaatccctagtaattcatgtacaaaccaaaggttcatcaagtcagtaaaatcaatagaaacaaagttgttcatattgtagtgaggaccttggtgtaggaaaagataatgcttcattggcatttttttgactagttgccaaattttataaacattctttggcttaacgttccagtcatttaaaccgtgaacagaaatccaagaacatttgatgccgtcagcgtgatggcggtagtttcttgcttcccaaaagttggaatattgaccggtttcacggtcttcttttgttaaaagctctttttgcatcttgtcgtattccggtttgatcttcaagtaagaacctgcatcccacaagtttgattgacaagtttcagccagtaaatcaaggtcttcaccttggcaggcttcgggtgcgattaccaaaccgtgttcacggtaatagtcataccaagaagaaatagcagcttcagaaaccacagttttcaaacctttaaccccagtagtggcaatagcaatttgcaaagtgcctaaatatgaacgaccagtcatcccgatattgccattgcaccagtcagctttggtttgaacagatctagtacggtcagtgtaagcaatacgatcgccgtggagccattcgataactgcagcagctgattcagtttcttcaggtgcaccagtaatacgaatcccatcactaccacgggtaccgattgctccagcaaaaacactggcaaaaccacgagcaagcatatactcatttaatggataagaagatttatgtactgcttcttcggtagctgggtggttagagtcgtctggctgctttgctttaactattggtgaatgaacatattgtggatcattccaatcggcggcatcagataaattttcatcaacattatggttacgcttttcattagcgataattccgccgaaatatggtgaagcagtataaagggcaggcacttttaagcctttgttagtttcagctggtcggaaaacagtaacttgaatcaagtcactcttaccatcatgatcagtatcaagatcagtttcaacgtaaacaacttcacgaattactttgttggtatcgaagacaggaatagctttgccattgaaaaatttaaacttattttgtccccagaattgagtaaagtaccccttaccagccattacatcgagcaaaatttgaccgtttttggcgcgagtattgagcaaacgataaaaagcagagattaactttttgacatcagaaatgtcttggacaaaaggtaaagcattcttttgcataaagccggttggatcggctaattcgtagtcataatgaacatgatagccaagtaattgtaaggctacattatagaattgagcagtaccaattgattcaggctttccttttaaaaagtcagctaaagtttgctcatttgaaacagcaaattcagataattttgttgtcttagcagcgtcagtttttgcttcagcaattgtcattttaacgagcttgcccagcaaatcgttaaaattccagtctgcataatttttaggtaagaaattgatgtcgattaattcttttacttgttgatcgaagtcagtttcgacataagcgtattggttatatttcatatttttctcctttgcagtttaattactttctattttacttttaattgtggctataaccaatagatatggaagttaataagcgaaaaatatttttattttggtattcttttctttaaaatggacttaaacaaatcggtgatgctaaatgagaaaaaagttttcacttgtcttgctacttacaacgatatttacaatttcgctgacagcttgtactaatcagaataaggttgatcatactaaaagtcagactaaaatcacctcaacaccgacattatttttccacggtggtggttcgtcatatcatgctgaagaacacatggtggcagcagctgagaaagctggagtcacgaactcagtgattagagctgaggtggcgcctaacggtaaggtttctttgagtggaagttggaaaaaaggtgccaaaaatccaattgtagaagtcaattatgaaaataaccgtgagttgaacttttctcgacatggtgtttacgccactaatgtagtgaaggctctgcaaaagcgttatggtattaaaaaatgagcatgttcggtcattctttaggaaatatttcgatcatttattatatgctgcaaaatggacgtaaccggaagatgccacaattagtcaagcaagtcgacatggcagaacattttgctggtttgaactttagccgtgttcccgcctcaattcgtcaacctaaaggtttaaaattgaattctgccggaaaaccgaacaaaatgaatgctagctatcggaaaatgacgggtgtaagagaaacatatccgaaaaataaagttcgtgttttaaacatcattggagatattggtggtcaaaccgatggaacagtacccaatgtatcatctttgtcattaaagtatttagtggcagatcgtgctaaaagctatcaggtagtgaagtttactggaaaaaatgcacgtcactccaagttgcatgagaatccaaaagtagataaagtattaatcaaattcctgtggaataaataaagttagtaataggcatgcgaacgtatgtctattttttgtgccttttcttaatccaattacttgaattataaaataatgcgtgtataatattcatctaattaataaagaaagggcatggttttatgaagctattaaagactaaaatcttaacaattctgtgtggcttgctaacattgaacggcttagccatgttgttttcaggattgattatccaaatggacgaagttgctgattttgattcagcccaaagtttagcagttgctaattcgactaatgccattattttggcaggaattattatgattttgctttttggggcattgtttttcgatggttgggctaagctcaagaacaggcatgctaagcacgttaagttagtttaatagaatagataagactagctctgaagtgagctggtctttttttgcccaaaattaaagtcttctttaccgtttttttacttttgcatgtgataatgagccaaaattaatcagggggatagttatgggattctggtattattatgttttgccattagtgacggctattttattcgtttggctaggaaaccgagttatggtgactaaaaaatggattagcataattttttactcattagctggagtaggctatttaattgcatcggtttttgctgttttttatatctatgcaacagtagaagaaattttaacgccagatattttaacaaaaataggttggcattatttttggagtgataattttatttttcttcttaccagcactgttctattaacaattagctattttgtactaaaacgtggtagattacgcagattacggatgaaataggatgctcaaaaatgataagattatttttgaaaaaatagaataatgatggggtgaaaaaatgactttaccatttaaggcagttgctgtagatatggacggcacgtttttagatgatcgtaagcagtttaatcacaaggaatttgatcaaattttgactgaatttgaacaacgaggagtacattttatcgtggcttcagggcgtccttatgttagattgaagcaggactttggcaagtttgccagcagaatggatttcgtaactttgaatggctcgagattaatcatcaagggtcaagaagctggcagttatttgcttaatcgcgatgacgttttaaagctaattcatgatgtacatgtgaaatatggtgaaatggctacgatggtttttggccgagatattgcatatttgcatagcaatgttgaaaaagatgaacgcgactttttggcttactttgctggtaatagcactgtaattaatgactggaatgacttaccagataagatttatcagatcacatttggaatggacagttctaaggctgcagaaattgaacgagattttaattctaagcacgataaccagatttctgcttttgcttccgctacttttgccattgatgttaacacacaaggtgttaataaaggcgccggattaaagcatctcctagaaaagatggggatgacctgattgcctttggcgatgggggtaatgacatcgatatgttgaaatttgccaaatattcttatgcaatggcaaacggtatggacaaggtaaaaaagcaggcgaaatatattgcaccggccaatacggagaacggtgttttcaaagttttgcaaaaatatttagctgaagataaaaaatagcttgtaaaattaaattaatatgatatagttttaattaacttatagaaatagaggaaattgccatatgattcgtttactgaatctctaatatttgatttgttgtttagcaaaatactgtctttgcaccttgtttagtgcacccattttttgcttgcataccaagtattagcagtagatgaattgagggtggttttctttatcgaaatcaacctttatttgttgcactgttaataggatgtgagcatccagaacagtgctttttctttgcgataaatcatgttagagatttttttgctgattatacgtttttgtcaaaaaagaatgaggaaaataatgggtttaagagattatattaaagctaaccgtcagcgggcaatgttagttctgtttttgattacgctaacgcaactgacaactacaatgtacacctacttaactagtccgcagttaaatgcaattgcaagtggtaaattcgaactgtttttggaattaatctttgtacaatttttaattggacaggtctgcaatgtcagttttaattggggaagtttacaaaataccaaacaaacacagacactttttcatcaggtaagacagcgaattatacgacattattatcagcagcctgaagacaaagtctcagagatggaaaatcatttgggaaatgacttgcagttagtgcaagagagttactataatgtttacttctattttgtttgtgacttaatttatattattttaactattggtacgctgtttacctttcattggatattggttgtctatacattattagttactttgcttgcagtagtagtgccgaaattgactgaaaaatataccaatcgagcaactaaagctgtttctatccaaaataagcaatttttgcagttgttagaaaaatggttcaagggtttagatgagctgcgacgctaccagaataaagttgttttgaaaaaggtggtgggacaacagagtcagaaactagagcagagtgaatatcagcgagataaattgctacattatactagcttagtgtctgcgatatttaatatagctggtcgtgttggtgttccatttattgctggaattttgtttttcaatcatcaggtaaatttaggagcgattctgacagcgggatattttgccaatggaattttttatagtgtagatagttgcgtgaacagatatacgcaattaaaatcaacgaaaactttgcgggatgatctggctaaattgcaaaagtgtttaccagaaaaagggtatgattctttaaaacaaatcgctaccgttcaaataaaaagcttgtcagtacaatatccaaatggtgaaagaattacttatcctgactttgaactgaagaatggtgaaaaggttttattgactggtgattcaggtacaggaaaatcaactttattaaaagttttgttagggcaaattaagccaagtacgggtgaagtaatctattgcgataaaacaggaaaaaagatcaaacctgatttacgtcaattaggttatttggcacaggacttattgatctttcctggcagtattcaagaaaatattactatgtttaagcctaagcttaataaaaaaactgtacaagtgattcataagacggtttttgatagtgatcaagcgcgtttgaaaaatgggatagagacacagcttgatccacaacaggaattgctgtctggtggacagaaacaaaaggtagttttaatgcgggcgttgttgcatgagaagccgattctgtacttagatgaagcaactagtgcaattgatcaacaagcaacgacaaaaatcttccaaaacttaatgcaaagtagagcaacaattttggccgttgcacacaatttaaccgtagaacaacgagcattgtttgatcgtgaagttcacttggagggaaaataatgagtagcaaagaattatttaaacttaatccaattaaattctgtctggctatgggactacagattattgcagcagttggcgaagtagttgtagcttatgtgttaactttgcaatttgatgctgccaaaaatagaaacttgagtttatttttaacttggacattaatccagctgtctagctatgtcatggtattcttattctataatttggcgggaatcatttggcaaaagttgattcaaaattacctgcatttaattcggcaagaactaacagatcattattttgccgatagtcaaaagcatgcggttagtgcagtgcaaaatcggatgactaatgatttgaaactgttacataatgactatttagattcgttccgctatatagtagggatgctagccggtattgtcggtgtagcctttagcttggtgacttttcagtggagtttgttagttgcttgtttaatttttgccgcaattcagatttatttacctaaattactggataagccattacaaaaagctactgaaaaggtatcagtagctaatcgaaagtatttgaagactttaggtgattggttaattggcttatcagaagttcgtcgctatttggctagcgataagctttttaagactattgctgaaaattcaggacgcttggaagcagcaaatattgagaaggaaaaagtagatcaggaattagattatctgaatcaattggcttattcattaggagatgtgctaatctttcttttaactggatttttggtagtgaataattgggctgcttttggtttgattgccagcattggcaacttcaatggagcactatttggttctttgcaaggagttgctaattatggtggaagaatgcgagcaacaaagaaattgcgagaagagattcttgtagctagaaagaaaattcagtctgaacataaaagtaatttagaacaagcggttagtttttcaatccataatttagctatcgattttagaaacggtgaggccgtgactttcccagatttccaagttaaagctggagagaaaattttactaacaggtgattcaggtacaggaaaatcaactttactcaaattgattttaggtgaattgcaagccagtcgcggcaagattcaatactttaatcaaaagggtgaaaagattcaacctgatttagctaaaattggctatttgccgcaagatccagtgttattcccagtaacgattgttgaaaatattacgatgttcaattcaaaactgctaaaccgagttaaatcagctattgaaaaagttcaatttgcaggagatattgctaagttttcggctggcattgagactaagattaaccttgatcaattgaatgtttctggtggtcagaggcagaaaattgttttagctagaagcatggtgcaccagagcaagttgattttgattgatgaggcgacaagtgcaattgatcaggcggctacgatgaaaattttgcgtcagttgactaagacggatgcaacgattgtattcattgctcacaactttaatcaagaaatgcatcaattgtttgatcgtgaaattcatttaaagaaataaaaacaagctcataacctcaaagttataggttatgagcttgttttattatagccaaatttgttcgaaaatatcttctttaaaaccgcaagttaaattactgtcatcaacgactaatggccgcttgattaacttaccattttttgacatcatatctgcagcttcttcaatcgtcattgttggcactttttctttcaaattttctctgcggtaatcttgaccgtgtgtattgaagaaatattttagaccacgatcttgatatttggtcatccattttaccaagtcttcttttttcggtggctgttcaactaaatcttgaaattcgtagttgacctgatggtcatccatccacttgcgtgctttacgtgaggtagagcaacgtttataaccataaaatttaatcattattttccgtccttatttttgtaaaaattttctaaaaaattcaatttcttcatcatttgcgatatcagctagctcgtctttttgatcaacaaagaacacatgaccgcgaggattgtcttcatcaccataggacttgcagatggcgtgaacaccgcgaccgagcaagaagccaaagagggtaaattgcatgtcatgcaaaaaatccttgttagccgtgattaaaaaagtcggcaagaaattgtgattgatatatttttcaacgtcgagttgttcatgatacttgttaactgcatttttagtgaagtaggcgctagccatgccatctaaattgcttggggttaacatgaaggaagcagcacaattcaagccgacagccctaaattttaagttcaatggtttgtaagaaaataacttggcataatctggattagtcaaaatagtgacatactgctcagccatttgaccaccggcgctgtcgccaacgataaaaacgttgttgcgatctagacgatattcttcagcgtgctcatcaacccaatgcatgtagcgatcaacatcgtctaattcatcagggaattccgcgttttctggtgcaagacgatagttgggattgatgaaagcaaaaccgcgcttagctaaacccattccataatattggtagatttctttagtaccataaacccaaccaccgccgtgaatattgatgatgacagggaagggagcttcgtgctttttgggtaaataaacatctaaagtatgccacttttcatctggaccataaggcagattatcaagacgttcaacttcagggatgtcgtgaggcaagccactgtcacgtttggtgtcatgctgatatgcaccatctctaaagtcagtaacaaactttttgattttatctttaagttccataattgttctcttttctagtaattatctatgttaactcaattatactttaattgaatttgaaaaaataaaaacttttttgaaaaatcctcttgcattttaattaacgtttccctataatagtctatgttctgttgaggacgtacaaacatacaagatggtctggtagctcagctggatagagcaacagtcttctaaactgtgggtcgtgggttcgaatctcacccggatcataaattaagcctgtaagcattggtcttacaggctttttacataccttaggtatctatgtgctaaattttactacaaagacaatatttttttacatttgatattgtatgatacaaatatatgacaattattaacttaatcttacattattagtgaatcagttgactaaagtttggaacgagcttattctaaaattgatttccaaaaaataggatcgacaagtgtgaacgacaactatttttaacattatcggaggaattaagattgactacaaccaaaaaaatcattgttagattggcatgcgcgactgttcttggtacggcaggggcagcgctgacacaagtaaatagaccacaaactgcagttgtgaacgctgcaactacctctgttgcagcccgcgcacttggagttgatgttgctagttatcaaaacgctgacttgtcaagtcatgcgcaagctggagcacaatttgcaattgttaaagttagcgaaggtacttcctatcgtaaccctaaggcatcaagtcaaatttcaacggctttatcaaataatatgatgccaatggcatatcactttgctacttttagttcaaatgcaagtgctgctgctgcagaagcaaattatgcaattcaaactgcacaagcatttggactacctaagggctcatatattgcttgtgactatgaaacgggctcaggcaataacatttatggtggtaaaacgccaacggctaatgcaattattgcttttatggacactataaaaaatgcaggctataagccacttctttatgctagttcatcagttttacaaaataatattgatactaatagtgtaattgtcaagtatcctaactcattgtgggtcgcttcatacgctatttcaggtagaattgatagtccaaacttcaattacttcccatcaatgaatggcgtttcaatttggcaatttactgataattggaagggattaagcgttgatggaaatattgctgttttaccattatcaattgacggtaatgtaacttccaacaatggcgcaatttcacaagctccagctaccagcaacaccaattctgctagctcaaccaataaaaccactgcttcatctagtcaaacaacctcatcagatagtaacaaaggtgttgcaactgctggttatgtaatgaagaagtcttacatctacaacaagaagggggaccgccaaggtggctactatgcagcttatactaatattactcattatggtgtagtgactcttgataatggtaagactgccttaaacatgggcaatggtcgttacattatggcaagtaatgttttaggtaattcacgtgtacttaagcacaatgcttatgtatataataacaagggaaaccgcgctaactggagagtgcttagaaaaggtacgccaattaagacctatggttcacggatgcgcgttaatggtaaaagctgttaccgaatcggacgtaacatgtacgttaaggcggctaacttttaattaaaagtattcaggaaacgcctgaattaattaactgatagggatgaaataaacttgaaaaaaagatttatagcaataatattgatgctactgactttaacgggttgtactataaaaagtactacgcctaagaaggctaagtcgtcagttaaaacggttaaagtcgataaacagcaatctaaggaaaaacaggctaagtatcaagtgatagaccaagtttggcgaattcaacaagatggcgttgatatttatggtcatatatatctaccacagggtttagctggtaagaagaaagcagtaattttggctcacggattggcaggaaattaccgtgatctaaacagttatgctaaatatttagctagtcgtggctatgttgcctatacttttgattttcctggtggagctaagaatggtcaaagtagtggtgtagatcaattaaagatgtcaatttttacagaagaaaagaatctacagctggtattaaatacaattaaaaataggactgatgttgaccgtaaacaagtgtctttgctaggcgagagtcaaggtggagcagttgccgcaatgctcgcaagtaaatatccgcaagaagtaaagtcattgattttgctttaccctgccttttcgatcactgattatgcgaaagcggcttttaaatcagaaaaacaagtgccagacaagctcaacctatttggcttcacaattggtaaggcctattttgaaaacttgttcaagtataacttgttaaaagaagcaactaagtatcatggtccagttttaataatgcatggtacaagtgacatgattattccagattcttattcaattaaggctaataaaaaatttaagcactcgaaattatacttatttaagggtgcaggtcatgattttaaaggtaaatatcatagtcgagcaaatactttaattgataaatttttgcagaaaaatgggaaataaataatgaagaagaaataccttggtttattggctttattaagcctattgagcgtttttgctatttggggtcaaagcgttagagctgatgttgattatgatattgataatgttagagccatagcaagagttaataaagatggttcactgacaatgcatcgaacaattaagtattcatttgatagtgatgctcgtggcgtttattataagcaaaatctggctgtaaaacagaagttgagcaacattcaggttaaggtcgatggacaaaatataaaggccgcaacaacgggcaaaaataatacgtataaattgcaaaagcagggcaattcttataattttaaggtttatcatcgaattaaggaaaatgataaggttaaagttgagtattcttatctaattcaccgggcaattactaattatcttgatacagctgagctgaactttaaaatagttggtaatggttgggatactgacttagatcatgtgcgtgctgaagtgatttttcctggggcagttaaggggctaaaagcttgggctcatgggccactaagtggttacactcaggttttgccaaaagagggcaaaattattatgactgctgatgatgttgcaggagatagtggtgtcgaagtacatgcgatttttccaactacggtaactagtgctaatcagaatattgttaaagaaaataagaaaagagcatttgaaaaacaagaagcagcattagcaaaagaagctaatcagaagcgtcagcgtaagcagatgcttagtataggattgatgatcatttcagtacttgtcggttttgtggtggtaattagaggcttttttattaaaaaagttggggttaagccaaaaatagagcgcgatttagtacataattatgaaattccagatatatcacctactactgcgcaaattttggatgaagctgataaaccaaatgttaaagcatttgcagcttatttgatgcaattagctggtaaaaataaaattaagatcgaaaaatatcaaactaaacatttaaagcggactaattatcgaattactttagtagatgatagtgttttgactgatgacctgttagactttatttttaacaaagttggtgatggtaagtcatttacaacgaaagatttgcgggattatacttctaaaaaattgggtaggcgttttgataaatggtgtgacgggcaatataagcaagttgaggataaggacttgcttgataaaaaatataaaaagcagcgtagcaacttccgaacggggatgctcatgggaatgattgctagctttgcgatctgggtaattagcttaatgatggcaaataatatacccagttttgtgataataattggaatcatgatgatcgtcttagaagttgttgcattcatagtgggcaattctcgtttaagtatttatacccaaaaaggtgcacttaagacagatcaagttcgcggctttaagaaaatgctagacgatattggtcaattcaagatgaaagacgtcggtgatctgattttatgggaagacattatgccgtatgctgtagcgtttggtctatccaaaaaggtattgaagcagcttaagattgaatttgcagatgaattagatgctgcaccagttctgttttatagtggattctatagtagcagtagtgacagttttgagcatagttttgaacgtagcttctcttcagccgtgtctactggttcatcttcagtttctggaagctcaggtggattttcaggtggatcgtctggcggctttggtggtggcagcggcggtggtgctttttagtgagaaatttttatactataattaaactaaaaaaggagggctaaattatgccatttgtacatattgaattaattaaaggtcgctcagatgagcagattactaacttaatgaaggatgttactgaagcagtgcacaagaatactggtgcgcctaaggaacacattcatgtaattattaacgaattaggtaagcatacttatggccaaggcggcgagtggagagcttaataattaggaattgtagtaaaagacgactcgattgtgagtcgcctttttatatagttaaatagataaacttgtattagagccttaaagctatgtgtgcataaatgaattatttatttagaatcccacgtaatataatgatgttgatgtctagatatttacgaggaggatttgaaatgaatttaaaaaagaaaattgcaatttctgcaactgcactgactgttgctctctctactgcatttccaattgctgctgcgcaaagtcagccggtaaaagcagtaggtattgtattggttcatcgtgttacagcaggtgaaattgctggaggatttgccctagctggagctgcaaagctattgaactttatgcagcgagctgatgaaatggatgctgcacaatataatcgtcgtgcgaataagattaataaaatgcatttgttacgaacaaaccaggtgccgtttttatctataacaaacgtggccaaattttgaataaaaagtcaggttgggttccaatgggcacaatcttgcgtcgaccaaaaggcctttataccattaagggtaaaaagtactattactttggtaaaggattgttcttcccaaagagtgggacagaaccctatagaattcctaaaaagcatataagtacagcaggtgaaaatttcgctaattggttcaattggcttagaactcgataaatagaaaaattaggaagtgtctgggaaaaaactaattctcagacaggaaaaaagaacgatgatttcctaatggatttcatcgttctttttctatactttaagtgccttccttgatattattgaatcaccacaaaacaaaaagaaagaaggcaatcttaatgtatcaaaattataccataggtcaaacagctttaacactcaacttagacttcgctattcctcataatcatttggctaataccattagctggtttgtcgattcaattccagaagatgtcttattgggtaatactgctaaaaccggtcgtccagcttatcatccagcgatgatgcttaaaatcttgctttttgcttattccagaagagtattttcaggcagaaaaatcgaattaatgctggaagaaaacgtgccgatgatggctttggctgaacaccaacagatttcttaccatactatcaataactttagatccagcaagcatgccaatgagctggttaagaaaagcttcctctactttaccaatttgttagaagccgagggccttatcaatgaaggagcgatctttattgatggcactaaaatcgaagctgacgccaatcgctatacttttgtttggcgcaaggcagttgaaaaatttcatgacaagctcaaaggtcaagcggttgagctttatgatgaattgattgccaaagaagtcgtcaaagcaatggcaaaagagaaagtccagaccagtcaaggtttggcagagctagcacaagaaacggaagccgagattgaaaagctgaccgaagaaattgagcaagaacccaaagcaatccctggcggttcgcctagaaaagcaagaagacgcggtcttaaaaagctgcttcataaactaagaaaagactatgttcctcgaatgaagaaatatgaagaggcgaaagaaatctttgcagggcgtaacagctattctaagacagatcatgacgcgactttcatgcatatgaaggaagatcacatgaagaacggccagctcaagccaggctacaatattcaagccgccaccactgatcaatatgtggttgactttgctttataccctaatccaactgatttcagaactttcgaaccatttttaaagcagatgacgacactagacaagtttgacaagattgtcgctgatgctggttatggcagcgaatataattattcaatgttagaagaagagtattcagacaagaagtactatattccttataccatgtacgaaaaggaaaagaccagaaagtatcgcaacgatccaactaagctggctaactggttctatgatgaaaaagatgattattaccttgatcaaaatggcgtcagattcaacttcaaatattatagtcaacgtaaagatcgatcgactggtcaggttcgtgattttaaggtctatgaagcagatgaatttcaactaacgccagaattagaacgcttagccaagactaagagcggacgccaacgtcaggttcgctataatcctaactggcaatacctaaaagaaaaagccaaagcagttctccaaagtcctgaaggcagacacatctacagcatgagaaaatatgatgtggagccgatttttggacatttgaagaacgtctttggcatgcgccgaactcatttaagaggcaaaaagaaggttgaaacagatataggaatagccttcatgatgatgaatttaagcaaatattggaacagaagatggtcaaaagaccaattttctttgttcaaaaataaaaatagacagaaaaagacggtcaagcaactcaaattaagagttggattgatcgtctttcagtatctaagggttagttttttcccagacactttttgcgtaaaaaaatttaatcactaaaacgatcaatcaattaacactacttcataaaaattagtataattatgttcgttactattagtaagttatacaataaaagtggtgagaataatgtatgattatcgaaataatatcaaaataattttaaataaaactgaggctgatgataaaagtctcgaaaatagtttaagtgcgattaaagctatcctaaatatggccgaagataatacagctgaaaaatctgagactaaatcagtaactcaacctaagaataaaattgcaaatacacaatcaattgcacaaagaaatgcagatttaaagcaatttaagcaattattgattgggctgacagccttaattgagaccccaggtgatgaaaaagctaaaaagagttcacttgatgctttacacaagttgacgtttgttccaggcgttggcaagcgctatagcaatgttttgggtaaattggatcaggcaattcaaaaatctaagacaactaaagaagctgttaacaagaaaatttttgaagaagcaatgaagcccaaagagcaacctaagcgcgattatcgtaaaggacgccgctatactgttattcgggctttatcaggctgtaatttgattaatgatagtggtcaaattgtttaccgtattaaagaatcacaaattcactctttgaatttaaagagtggtgacatagttgaagctattgaaaatcgagataatccaaattatgaagcagaagtcttgcgcgtggtgggttatcgcaaattgcgcatgcgtgattatgacccaatcgaagaattccggtatgctgtggtccgcggcaaggccaatcaattagctatcactagaaatattaagggcgaaaagttgcgaattcgcggtaaggatatcacgattccggttgattcaagttattatcaaggtgaaaatattcatgttgaagatggttcaattgtagatctagcttggtatacgggtgatgttcgcattaagaaaaatcctgctgaggcagtacagattcgttggatttatcaagttgatccgcctaagaaatcagatctgtcgtatcaaaagaaaaataagtcaaagaaagaagaaacagaagagttaactaaactcgacatgaatttgcactatcagcgggtgggaattgcgattggtgataatcaaaatgaaggaatattagaagggattgtttcgcgctataatgggatcccaattccaatagatgcttttgaaggcaagaagaaggtaatggaacggcaaatcaaagacttagatattgtaatcttgatgacagcttatgctgctcatgatgctacttggaatattcaggaattcgcttcaaagtatggtgttaaatttgccgtttcttcatctaaaggctaccgttcttttgagcgagcattatatcgagctgaaaatgggttacctgcttatgaaggaacgcaatcaatcgattataaagaagttaaaaataaataatttgttaatattattttgtttgcttgagctaacagatgatttttcgttaaaatagtactaactaaaagaaaggacgcttaataatgaaaaacattaaacaacgttcctggatgagatggttggtattcttagcaggacttgaaataatcgcaatatcaatcaatcttttttatggaccgattaatattgcagctggtggctcaacgggtatttctattctagtcgatgcagtatggggaattaatcgatcaattacagtgtttgtagtgaatggcttgatgctgattttggcggcaatctttttaggcaaaaagactacccaaaatattgcattaggtagtttgctcttaccagttttgatggaagttacgcctagctttaaagcagtgaataatgacctactagccgtaatttatggtggtgcattaatgggacttggagtttcgctactttatcgcgttaatgcctcaagtggtgggacaacaattccgccgatgattctgaagaaatatttttatttaaatcctgcaactacacttttatgcattgatatggtaattattttcttgaacatttttgtcgatggttggaatgctttcttcttagcagcattttctcaagtggtaactgccattacgatgcgctatgcggagaccggttttgataaaaagtatcaagtcagaattatgagtaattcagatttagaccgaattcaagatatgcttaaagaagattatcaaggcctgacgatttatgatgttataggtggatatagcgacgaaagcaagcgtcaattattaatcgtagttgatccacgtgaatatgggccacttatttctaaagtacatgagatcgatcaggatgcgtttatcattaccgaaaatgttgcaaaagtgcatggcggtcaatggcgaatgtaaaaaaataattgatcttagtctaaaagcgttgtatgatataagagttgtatttgtggagacctccacatctgcaaccgcacggcttgaggttagaagtcttcttatgtaagaagcaccccagttcggcgagtctaagtatttttttcggaggtgtacaaatgtacgcaattattaagaccggtggtaagcaatacaaagttgcagaaggcgatagcgtatttgtagaaaagcttgatgctgaagaaggtagctcagtaacttttgacgaagttatccttgttgctaatggcgacgacgttaaggttggtactccattagtagatggtgctaaggtaactgctaaagttgaaaagcaaggcaaggaaaagaaagttgtaacttttaagtacaagcctaagaagcactcacacagcaagtatggtcaccgtcaaccttacactaaggttacagttgaaaagattgaagcttaattcagaggtgaaatgaatatgaacattttaggtatgaaattatacgctcaccacaagggtggtggttctactgccaacggtcgtaactcagctggtcgtcgtttaggcgccaaggctggtgacggtcaaactatccacgcaggtactattatttaccgtcaacgtggtactaagattcacccaggcaagaacgtaggtcaaggtggagacgacactttatttgcacttgttaacggcgttgttaaatttgaacgtcttggcaagtacaagaagcaagtttctgtatacccagctgaagaagctaagtaattcagagattaacatgaaaaggcgagtagcataagccacccgtctttttttatggctttttccgcccagaaacatgtataattaaaccaatatcatacaaaaagagggtctctgagatggaaaataggcaagaattattatccttaattaaccagcgaattgagcatgtaactgatttaattaaagaagcaaatgcagatgcattgattatttttaatcaagctaattatcgatatctaaccaattttacaggggaagaagcacaattaattttgactgctagtggcgaacgggtacttttatcagattctcgttttgctggacagattaaagcacaagcacctggcgaaatggatgttgtaatgaaacattctagtgattatgaagaacttactaaggccttgaaaaaaatggacgtcaagagggtcttagttgaaggtgaattcgtttcagcgagtgaatatgaaaaacttaagcaactaaatccagaacttgaatttgtgatggtcgaagaattggttgaacgagtacgtaatattaaagatgatcttgaaattgcggcattgcgcaaagcaattgatatttcaatggaaagctttaaaggtattttgccgatgattaagccgggcgttaaagaacgtgcaattggtgctaaattggactacctatttaaagttaatggcggcgatggccctgatttcgatacaattgtagcttccggtgtgcgttcggcttgggctcatggcgttgctagtgacaaagaattatccgaaggcgatatgattgtcattgactttggtagtttttatcacggttatgcggcagatattactagaactgtttcattaggtgaagttgatgctgaaatgcataaaatctatgatattgtacatgaagcacaacgccgtggcattgccgcggcagttgcaggtaatactggatatgatgttgataaagcagcacgtgattatattacagaacaaggttacggtcagtattttggacacgggatcggtcacggcattggtcttgaaattcacgaattgtgtcaaccagctttaccttttagaactactaaattggtcaataatatggttcatactgtagaaccaggaatctacttgccagacaagggcggtgttagaatcgaagacgatattttggtccatgatcaaacgcctgaaactttatccactttgccaaaggatgaattgatttccctataatagctatttaatttatcgtatttatggtaaaaacgcttcaagattggtaagataataattgtagaaatgagggacttaatatgacaatgatttcagtaaacgaattcaagaatggcttgactattcaatacaacaacgatttatggcgcattgttgaattccaacacgtaaaaccaggtaagggtagtgcctttgtacgttcaaagcttaagagtttgagaactggtgctgtacaagaatatactttccgttcaactgctaaggttgaaactgcagacattcaaactaagtcaatgcaatacttgtacaatgatggctcaagttatgtattcatggatacttctacttacgatcaattagcaattccaaatgaacaaattggcgatgaagctaattacttattggaaaacatgattgttaacgtagttatgcacgaaggtgaaactttaggtatccaattgcctaatacggttgatttgaaggttgctaagactgaacctaacatcaagggtgatacttcatcaggtggtggtaagccagctactatggaaactggtttagtagttaacgtaccattcttcattaacgaaggtgacgttttaactattaacactgctgatggtacttacgtatcacgtgcaaataagtagtttatttgaggtaacaaaatggcagatagttcaaaaattcttttaagtggtgaagaaaacagcgagcaaattaaaattgatccaagtgttctagaagttattttgggtattgctgcagaaaaagttgatggtgttgccggaatgcgcggcagtttgaaatcaggcttaaactgggttttcggtcgtgaagatcatggtaagggcgtaaatattagtgttgatgacgataataagctaattgctgatatttatgtttatcttgaaagcggcgttaacgttcctaaggttgcaatgacgttgcaaaagaagttgaaggcacaattattgcaaatgactgatcttgagctgaaggcaatcaacgttcatgttgtcggtttagttttcccagaagatgaaaatactgaccagactacatcagagctgtttccggaggacgaagaagaaaaataatgaatcaacacgaaagtcgaaaagttgctatgcaagccgtttatttggctaatcaggagccagatttaactgccgaagaagttgaagcaaaagtcgttgcaacgcttaatttaaaacagctttctgcctattctaagaagttaatcgaaggcgtactagaagatcgcaaaaatttacagtctgaactaactagtcatttgaaaaagggctggcgtcttgagcgtgtaagtcaaactgtggtagctatcatggaagtcgctttgtttgaaatcaatcatagtgatgagattgatgctaaggcagcagttaacgaagctttaaatttatgtgacgaatttgctgagcctaaagagaaaccatttattaatgggatgttagcaaactttgttaaatagcgatgaatagccggaagttttgccggttatttttttataaaggagacaaaattaatgggagaaattcttgatggtaaagtatttgcaaatgaattgggacaaaatcttaaagaaaaggttaagaatttaaaagaaaaaggaataacgccacatttttgcgtaataaatattggggatgatcctgctagcaagatctatgtccgtactaaaaaacggcgtgctaaaaaaatgggcatcattcaagatatttatcaaatgcctgctgatactgagcaagcagaagcattggctttgattgataaattaaatgccgatccaacgattaatggagtaatggtacagttaccagctccaaagcaaattgatgcagatgagttactagagagaatagatcctaataaagatgttgatgggttaacgccagctaacattggtcgtttgtggatggaagatcattttattgaaccagctacagctgagggaattattgctctattaaagcactatcaaattaagcttgatggcaaaaatgttgtggttgttgggcgcagtaatattgtaggtaaaccacttgcagctctaatgcttgagcaaaatgcaactgttactatttgtcacttacatactcagaatttaggggaaatcacaaaaaaagctgatatagttgtatctgctactggacaagcatttttgatcactgctgatatggttaaagatggagcagttgttgttgatgtgggcatgaatcatgttaatggtaaattagttggtgatgttgattttgacaatgtaaaagaaaaggctagctacattactcccgttcctggtggggtaggcccacttacagtacaatttttaatggaagcagtagttaaattgactaggagacaaaatggccgagaataaatatttaacggttactgatttaaattattatattacgcaaaaatttaagaatgacccatatttgcacaaagtcttcttacaaggcgagctatctaattttcgctatcgccgtaattcgcaccagtatttttcgttaaaagatgaaaaatcgaagattaatgtagtaatgttccgttcgttctttgaaaaggtgaaatttaagccagaagagggaatgaaagtctatgtggttggctatgttagcgtttatggaccacagggctcgtatcagttttatgctgagcagatggaaccagcaggtcttggagcattatatgagcaattgaagcaattacaagccaaattagctaaagaaggattatttgatcctgctcataaaaagccattaccccattttcctgatcgaattgcagtagttactagtgcttctggggccgttattcatgacatcatggttactgctaatcggcgattcccacatgcagaaattgacctgtatcctgcacaagtacaaggtgatactgcggcagattctttgataagggcgatgcagcaaattgcagcacaaggtgacaagtatgacgtaatgattattggccgtggtggtggttcactagaagatttgtggccatttaatgaggaaaaagttgtgcgtcaagtctatgctatgccaatgccggtaatttcttcggtaggtcatgaaacagacactactttatgtgatttggttgccgacgcacgtgcagcgactccgactgcggctgctgaatatgctacgccaaatacgctggatgaacttgctcatattaagcaattaactagtcaattagttgctagtatgcaaaatattattcggtcaaagcgtgatcgtttaagccgggtgcaaaattctgttatcatgcgagaaccaactaggttatatgaccaacaaattcagcaggttgatcaattaaaacaacgtttgcaaaatagtatgcaaaatcgcgtaacgcattctgcacaaagttatcaattattaaaacagcgtttatttagtgtcagtcctgataaaaaaattaatcagctgcagcagcaaaaacaatttttgcagcagcggatgattgataatatgcagcattatttaaagaataagcgcaatgtttttactcaagtaatgcaacagttagatgattacagtcccttgaagacattagagcgtggctttgtttattcaactaatgagcatggtgaaacaatcagttccgttaaacaagtgcaaaaggatgatcgtttgttattgcattttaaagatggacaagttgatgcggtagttacaaagataaaggaagaacaaaatggcagtaaagaaaaataattttgaagaacagttaactagtttggaacaaattgtacaaaatttggaaaatggtaatgtccctttggaagatgccttgaaggaatttcaagaaggcgtgaagattagtcgtgatttggaaaagaaactcaatagtgcagaagaaactgtagctaagttaattgatagcgatgggacagaacacaagctggatccaaataatgcatcagcaccagaggaataattatgacagcattcacttattttaaagatcaatggacaccaataattgatgattatttagctaagcatttggctagtgaagtgaaagatcagaaaattagccagattatggcttattcagtgatggctggtggcaaacgcttgcgtccattattgtttttagcaacacttaacacattaggtaaaaaaattgaggaacctgaagttcgaattgcctgtggaattgaattgattcacacttattcactgattcatgatgatttgcctgctatggataacgatgattaccgtcgtggcaagttgaccagtcataaaaaatggggtgaagccgaggctattttggccggggatgcgctcttgccaatgggaattcaatggattgctgaaggtagtaattcagctcaattggtagaattaattactaaggcagtgggtccaaacggaatggttggtggacaatatttggatattgattcaaccaataatgctagtgtttctggagacgctaagttcattaacaagatggaatggctaaaaacaggatgcttaattcaagctagtgtcgaaatggctgctatttttgcaaaagctagtgacattgaaaaagtaaaattgattgactttgctaaagtttttggccgatcataccaaatttatgatgacttggttgatgtggttgagactagcgaagaagctggtaaagctacgcacaaggatgaagctgaaggaaagaataatactttaactttgttaggaattgatcaaagtcgcaaagaactaactgacttaattaagcaagcacaagatgatttgcatggactaaatggcgaagtgctaactggctttttagatctttatcaaaaggtgttataaatgacaaaacaaagagcagatattttattagcagaacaaggcctttttcactcccgctcagctgcacaaagagcgattatggcagggctagtttctgatcataatcatcaacgcattgacaaaagtggaactaagtttcctgaaggcgagaagttctatgttaaagatgatggcaaaaagtatgtttcccgtggtggctttaaactggaaaaagcattgaaggtttttaacattgatttgacagataaaatttgtttggatattggtgcatcaaccggtggatttaccgatgttgctttgcaaaatggtgctaagatggtttacgctttggatgttggttataatcagttagcttggcagttgcgggacgatccacgtgtggttgtgatggaaaagcaaaatttccgctattctaaaccagaagattttgaccaaggtttgccagattttgccatgactgatgtatcctttatttcgttggacttgattatgccaccaatgtatgcaattttgaaggatcaatgtgatgcggtttgtttgattaagccacagtttgaagctggtcctgaaaatgtaggcaagcacggtattgttcatgaccatgaagtacataaagcggtaatcgagcatacaatgcgtaaggcattagagacaggctttaatgtcctaggcgttgattattcaccaattaaaggtggcaaaggaaacattgaatttttgatctatttgcaaaaagatgaagcaaatggtggacgcaacttatggcaaggcagtccagctgaagtggttgaacgtgccataagtggcctataggagtgaaattatgctagttgagctggatatcaaaaactttgcaattataaaaagcttaaaagttcgttttcaagaaaaaatgacggtgatcatcggtgaaactggtgcgggtaagtcaattattattgatgcggtttcactattaatgggtggtcgtggtcaaaaagaaatgattcgttcaggtgagcccaagtcaattattaccggcttgtttgaattggataatcaaaaagagaaaattgcggaattatgtgatcaatatggattgccccatgatgatgatcaattagtaattagtcgtgaattagcagtaaaaggcagaaatgtagttcgcattaatggtcaactaactacaattaatgttttacgcgaaataggtaactatttagtcgatattcacggccagcatgatcagcaaattttaatggaccaagatcgtcagattgatttggtggataactatgccccagattcttttaagacggatttaacaacttatcagaaagattttactgaatggcaaaagttgactagtcaattgcgacatttgcgtcaagatgctcaagaattggcacaaaaacaggatattttgcaatttcaaaataatgaacttgaagcagctgatctagaggatccacaagaggatgaaaagcttgaggaagaatataacgaactaaataattatcaaaaaattgcggatacggcgaattacttcatgcaattgtatgatgacgatgagcatggaattgcaactttacttggagatgcgcaaaatgctgcgactgatttaactgaatttggttcaaaatttaaggattttgctaagacagttgatgatggagtttatgctttaaatgacgcccgcagtgaattatcgaacttaatggatgcaatggacttcgatgaggaacgttttcaatacgtgactaaccgcttggataccttgaattcattgaaaaagaagtatggcccaaccttggctgatgtgtttgctttttatcaaaaagtacaaaaagaactcagtcaatttgaaacaggcggccttgatgaggaaaaattgcaagcagaagttgccaagattgaagaaagaatgacccaagaagctagagatctgcatttaatacgcgaaaaagtggctcattctctggaagagcagattaagcaagagttagctgatctctacatggaaaaagctcgcttttctattaattttgatgaaacaaagacatttaccgataagggaactgatgcgattgttttcttaattgcacctaatccaggtgaagatttaatgccattagttaaaattgtttctggtggtgaacaatcaagattgatcttagctttgaaggcaatcttcagccgagttgaaccagtgggtaccatgatttttgacgaaattgatacgggagtttctggccgagtatcggctgctatcgggaaaaagatgcactcaatcggtcgcaacaagcaggtaattgcaattacgcactcaccacaagtggctgccgcgggtgatcaacgctacttggtagctaagcaagtaaaagatggttcaacctttactcaaataggcccacttagcaaggaagaaaccattacagcgattgcacagatgatggctggacaagatgtaaccgatgcagcaaagaagaatgctgcagatttgattaagagtattaaagatgactagtattagtaaattttggcgtgatttttgtgtagaacatcaagtaagtcctacagcattagaaggtgcttttgcttttggagctaatagccgggatgcagatattcttagtgatttggtcaaaagtggaattaagacggcaacgactagcctgtattctgcgcaagaagatgtaccggttgtagggatgtacgcaattgttttaaatggacgaaatgaaccagtttgtgtgattcaaaataagactgttgagattatgccatttaaaaatgtctcagctgagcatgcctatttagaaggcgagggcgatcgctcatatgaatcttggcgtaaagtacacgagaaattttttgcgcgcgaatgtcaagaactgggacgagagttcacagatgaaactgaagtagtgtgtgagacattcgagaaaataatttagtaaaggagcagacgattttgtctgtttttttgtatgcaaagagaaaacttgaaaaagaaacaattttagtgcaaactagatatattacaagttaagaggagttcagcatggcagataaaggtttattacttgtgctttctggtccttccggcgttggtaaaggaactgttaaaagcgcgattgttgaaaacaaagtctttccatttgaatattcagtttcaatgactacgcgtcaaccgcgaccaggtgaggttaatggccaagattatttttttgttagtgaagatcgctttcaagaggctattaaaaatggtgagttgttagaatataataaatatgtcggtcactattatggtacacctcttgcaccagtgaagaagatgcttcatgatggcaaagatgttttacttgagattgatgttaatggggcacaaaaagtacgtgaaaagatgcccgatggcgtgtttatctttttaaccccaccagatctacatacgttacatttgcgtttggaacaccgtggcaccgagtcagaagatgtaattcgtggtcgaattaagcaagcgcgcaatgaaattttggagatggaagactatgattatgcagtagttaatgatacagtagctaatgcagttgatcatattaaagcgatcgtcgatgcagaacatgtcagtgttaaacgtgtaattgatgactatcgtaagatggtcaaggaggattaattattatgagaattacttacccatcaattgataaattattgtcacgtgttgattcacgctattcattatctgttcttgccgctaagagagcacatgaacttgaagctggtgatccaccaactttggaacattttaagtgtgataaggctgttggtaaggcacttgaagaaattgctgctggtaaagttactgttgacccagctcatgccgaggttaacctcgaagattaatttattgaccttcatcctttggggtgaaggtcttttttacaggtgattaaatgattgctcaggttattgttgatgtagctgcacggcaaacagaccgtatttttgaatatcatattccaacagaattagaaaaggatattgcgattggatcaagagtagttgttccgtttggtcctcgtaaagtgcaaggttttgtggtggggatcactgatcaaagtgaatttaaaggtaaacttaaggatttgctagttgtggtagatgagatgccaccgcttacgccagagttggtaaagttatctgctgatttagcaaaaaatattttttcttaccgaattaaaattttacaagcgatgctaccttgggtaatgcgagcaaattatcgcaaattgctagtgccagctaatgatagagctgccaaaatgccgctgtttcagggtgatccaattgatttaaataaaattacggatctggcggagattaagcaattccgcaaattattgcaagatgatcaagcaaagattgagtatgtggtagaaaatcgagccaagaagaaaaaagaaaatcaatatgaactagcattaaaaaaagaggaatatcccaaaatttacaatactttacgtcaaaatgcggtaaagcaaaaaaagttattgatggatatcattgataatgcagcggattatcccaaaagccaaagccagctagaaaaacagcttggattgacggcggcgagtttgaattctgcgattaccaaaggttggttgaataaaaaaagtgttgaggtttatcgcgatccgttatccggatttgatgacggagaacataaaacagcggttaccttaaatggtgagcagcaaggtgctttgaaccagatcacccaagcaattgaacagcgccaggctgagacttttttgttggaagggattactggtagcgggaagactgaagtgtatttacacgctattagcaaggctcttaaacaggggcgaaatgcattaatgctggtgccagaaatttccttgacgccgcaaatggttcgtcaggttaaggcacgttttggtcaagaggtagccgttttacatagtgccctatctgagggagaaaaatatgatgagtggcgccgaattcgtcgtggcgagactaaggtggtcgttggcgctcggagtgcagtttttgctccactagataatattggtttaatcgtgatcgatgaggaacatgagtcttcatataagcaagaaaccgatccacgttataatgcacgtgatgtggctatttggcgtagtaaatttcataattgtccgttggttttaggaagtgcaacaccatcgttgagtagccgtgcacgcgcccaaaaaaatgtctatcatcttttacggttaactgaaagggctaatcaaaagaaattgcctaaagttaatttgattgatctaaagcacgtgcagtttgctggtggtcaatttgatttatctgttgagctagtagatgcaataaaaaagcgtttggcaaaaaaagagcaggttattttaatgctcaatcgacgtggttttgctaattttatgctttgccgtgaatgtggttttgtattaaaatgtcctaattgtgatgtttctttaaatttgcataaggatactaacagtatgcaatgtcactattgtggtcatactgagccagtacccacacgttgtcctaattgccaaagctcgcaaattcgttttttaggtgcaggtacacagaaggtacaagaagaattagaagagcttctgcctggtgcacgaatcttgcggatggacgttgatacaactagaagaaagggtagctataagaaaattctagatgcctttggtgctcatgaagctgatattttgttaggtacgcaaatgattgctaaaggattagatttccctaatgtaactttagttggagtaatcaatgccgatacaggattatggctttctgactataatgcttctgaaaagacttttgaattattaactcaagtagctggccgtgcaggtcgtgctgataaggaaggggaagtcttaattcaaacttataatccagagcattatgctattcaactagctcaaactcaggactacgaacgattttatggctatgagatgaatatgcggcatgctggtaactatccaccatatttttataccgtgctgatttccattgctgctaaaaaagaacagaatgcagctcgtgaggcttttaggattaagaggtatttgaatgagcacttgcatgtgccaacgattattttgggaccaacgccaagtgcaatttctcgtgtaaaaaataaatattattatcaaatactggtaaaatataaaaaagaaccaaatttaaatgaattattacaccatgttcaagattccgcgcaggaagctaagaaatatggtttaagtatttttattgataatgaaccagagagaattatgtaaggggatgctttaatgacatcaataatatttatgggaacaccgaaattttcagttccagtacttgaagggttaattgatgaaggctatgagattaaagccgtggtcactcaacctgataaaaaggtaggacgtaagcagaaaattactaagtcaccagccaagatcgcagcagaaaagcatgatttgccaatctttcaaccggttaagttgtctggatcagacgaaatgcagaaattaattgatatgcatgcagatttgattgtaactgcagcatatgggcaatttttaccaactaagtttttgaattcggttaaaattgcggcagttaatgttcacggctcacttttgcctaaataccgtggcggtgcaccaattcaatattcactaattaacggtgataaagaaactggaattaccattatggaaatggttaagaagatggatgctggtgatatttatgctcaagaagcaattaagattgagcctgatgataacgctggcactttatttagtaaattatcaattgttgggcgggacttattgcttaagactttaccagcaattattgatggctcaattaaaaaggttccacaggatccagaaaaggtcgtcttttcacctaacatcactaaagaacaagaaaagcttaatgttgatatgacagcagaagaggtcaacgatatgattcgtgctttgaatccagatcctggtgcttatttgatgattgaaggcaaacgtttcaagatctggaaggcagaaattgcatctgattcatcaagtttaaatgccggctctgttgttgctaacaaaggacgttttgccattagttttgctgataattcagtacttaacttacttgaagttcaaccaagtggcaaaaagagaatggacatcaagagctttttaaatggtcaaggtagtaagtttgtcccaggtgaagaaattgtcgatcgataagagtgcacgtgcagtcagcttagagacattgatcaaggtcttagatcaaggctcctattctaatattagtttgaataacagcttaaagcactctaacttgtcaattgcagaccaaaatttagctactaatattgtttatggcacgattcagtatcgattgtttttagaatatcagttaaaaggcttagttaggacaaaactgaccgaaaaatatattaagccattattgttaatgtcactttaccagttgatttttttggataaagtgcctgatcgtgctgtacttgatgaggctaataaacttgctaagcaatatggcaagcgacattcagctggctttcggttggtaaatgggattttgcgttcgtttactaggcgcggggtgattttaccagctgaaaataatccagttaaatatttaagtgtcaaagagagcgtacctgaatggttagttcaatatttaattgataactggggcctagacaaggcaaaatcagttttaaacagtattaatgagccagctaaaaacagtgtacgtatttcaaagttggcagataaagagcaagtttttgcccagttagagcgggataactatcaaccacaatggtctaagttatcaagtgatgatgtgattttgagtcacggtggcattagcgaaagtgatttgtttgaagaaggcaagttaacaattcaagatgaagctgccagtttagtcgtagaagcttttgactttgaacaagatgagcatgtgcttgatgcttgttctgctcccggtgggaaaaccgtgcaaattgccgaaagcattgttaatggtgatgtgactgccttagatattcatgataaaaaattacgtttagtacgagataatgcccagagaatgcacgttgcaaataaggtaaagactaaggcatgtgatgcacgtaaggctacagagatttttgcggcaggtgaatttacaaaaattttagtcgatgccccttgttctgggcttggattattgcgtcgtaagcctgaaattcgctatactaagagacaacaggacttacaaaatttacaaaaaattcaattggcaatcttaactgcagtaagttcactcttaaaaaagaatggcgagttggtttattcaacttgctcaatttcaatggaagaaaatgaagaggtagttaagaagtttttgcaagcacatcctgactttgaactagttccatttaagttaactaaacttgaatcaaagacagggatgttgaaaataatgcctgatctagatggcaatgatggatttttcattgctaaatttaagttacgaggttagatttttgattgaaacagcatacgcttcgagtattggtaaggtacggaaaagcaatcaagattttgtaaaagtttttaaaaatcaaaagggaattgtcttagcaattgtctgtgatggtatgggcggccatcaaggtggtgacgttgcttcaacaatggcagtcacccatttaggacataattttagtatgactgactttgcagatgctaatcttgctcataaatggcttgatgtgcaattaaattctgaaaatgaaacaattttaaagactgctgataagtttcctgacttaaatggaatggggacaacgattgtattggcgtttgcatttgataaaaatgccttaattgctcatttaggtgattctcgggcttatagttattctgaaggtaaatttgtccaattaactgaagatcattctttggttaacgaattagttaagatgggtcagattactaaagaacaagctaaacaccatccccagaaaaatattattacgcaagcattaggcgtctcaagtacgattgatcctgaatttgatgagatcaagatggggggaaacgacattattttgctctgtactgatggcctaaccaattcacttagcgatccacaaatccaacaaattttggcaactaaggagcttagcttaagagaacgttgtaataaattgattagtgaggccaatcgattaggtggtggtgataatattactgtctgcttaatttggaacaaggaggacgagagcagtgatcgataaaggttatctgcttggggaacgttaccgcatcatcgataccttaggtgaaggcggaatggccaatgtctatctagcggaagatattatcctgcaacgtaaggtggcagttaaaattttacgccttgatttgcagaatgaaccgcaaacccaagctcgttttcaaagagaggcattagctacaagtgaattaagtcatcctaatattgtttctgtacttgatgtaggtaccgatcatggtttgccatacatggtaatggagtatgttgatggtcctaatctaaaagaatatattcaaaaaaattcacctttggatttaaatgaaattattcgaattatggatcagatattgagtgcagttgcattagctcataagcacaatgttattcatcgtgatctaaaaccacagaatattttgatggataagcgcggcaatattaaaatagctgatttcggaattgccgttgctttgaatcaaagctcgattacacaaactaattcagtaatgggttcagttcattatatgtctcctgagcaaacgcgtggcggaatggttactaaacaatctgacatctattccttgggaataattttatatgaattgatcacaggaactgttccgtttaacggtgatacaccagtggcaattgcactgaagcatgcgcaagaaccaattccttcaattcgcaagaaagattcaagtgtaccacaagcgctggaaaatgttgttttaaaggcaaccgcgaaagatccacgagatagatatgctacagctcaggaaatgaaagcagatttggatagtagcttggatcctgaacgggcagatgaaccggtttttgtaccatatcatggtaataacgatgataaaacaattgtattgcccggatttaagccacaaaaggaagaaaaagaagtggtggagccagcaaaaaccgaatcagtagaatcaagcaagccagtaaagaaaaagacttttttacagaatgtcaaaagtcacaaatggtggtggctgatctcaattattgccgcgggtttaatcatttttatgatgattttcgctttaagtggtactggaaataaacgacaggatgttaatattcctgatgtaactaatattgcagaaaaagcagctgagagtaaacttgaagcagcaggcttacaggttggaaaaattattaggcgacaatcagatgatataaaaaaaggccgggttattgcgacaaaaccaactgcaggtaatagtctagagcgaggaaagagcgttgatttaattgtttccagcggttctagcatggttaaagttcctgatatggttgggaagaactatgccgaagcggcagaaaaattagaaaatatgggctttgatgtagttagagaggaccaatattctaataaagttgacgaaaatcaagttatttctcaaagcattgctgcaggtgtagaggttaagccgacgcagactacaattacgttgatagtttcacgtggcaagcaggctagatcacattcaaatatggttaccttgaaagacttaagtaattattctttgaagagtgctcaagactatgccaaagaacatggcctgactttacaaatcaatcaagaatattctgatgatgttgagaagggcttaataatttcgatggagccaggtccgggtactaaggttgagcgtggttcaactgttaccatcaaggtctcgaaaggtccaaaggaagacaaggaaactactgtaactaagacctttaccgttaactatgttggtgatgatctttctaagagtgagaagcctgataatgataaaggaagcaataactctgagtcagaatccgttaatggcaagggtgatcatgtccagatctatattaaggatgatgatcattccttgaacaatatttatcgtgacttgtatattaagcatgatatgagtttctcgattccatttaacattagagaaggtagtggacaattaaaggttgttcgcaatggcgatacagttttgaatgaaaaggtgactaaataaatgaaactagcgcaaggaaccgtcgttggtttgattgctggttattatgatgtagaaaccgctgcgggtatcgtgagaacgcgtgctcgcggcgtttttcgtcaaaaaaagcaaaaaccggcagttggcgatcatgtggaaattcagatagatgataaaggaatgagctatctggtgaaaattttgccgcggattaatcgaattgggcgaccagcagttgctaatgtaagtcatgttttgttagtaatttctgcagtagaaccggatttttctgtagagctgttagatcgttttttgactttcttttcttggcaaaaagttggtgtaacaatttacttgtctaaagcagatttgctatcagaagcaaagttaaacacaatcaagcaagctttagcatattatcaaaaaataggttatcttgttttcactgattatcatgaaatgcaaattcagattcctaaaatgatcgaaaaaaatcaaatttggactttagcaggacagtcaggtgctggtaagtcaactttgcttaaccatttaaaaaaagatgctaatcaagcgactggtgcgatatcaactagcttgaatcgtgggaaacatactactagaaaggtcgaactttttaagttaggcgcgggctttttagcagatacgccaggtttttcgtcaattgatttgacaccaatcaagttgaatgagttatgtaattactttgttgagtttaaaaaggcaagtattcactgtaagttccgcggatgtcagcatttgcaggagccaggctgtgaagtaaagaagttacttgaagccggagaaattctggaaagtagatatgaagattatttggctatgcggactgagattagcgaaggtcgcataccggaatatttaaaatagaggtaatagctgatgatgattgcaccctcaattttgaacgcaaataatattgatcttaaaaatgatattgaaaatgcagtccaggccggaattagccgttttcatattgatattatggatggacattttgtgcctaatttatcttttggaccgcaactaatcaaagatttcaagcgtgaatttccgatgacagatgctgaaattcacttaatgagtgatgccccagataagttggtaccagcttttgttagtgcaggagcagatttggtcgaactacactatgaagcaatggacaagcctaagttatattattggttcgattatttagcttctaatggcgttgatgctgctttggcaattagtccagatacaccagttgaagtggttgaaccgtatttgccattactgaaacaagtattagtaatgacggtcaagccgggatttggtggacagagttttcttcctgaatcagttagtcgaattaagtcagttagagagattgtcggctctgattttgatattgaggtcgacggcggtattaatgatcagactattaaattagctgaaaatgctggcgctaatatatttgttgttggttcatacttgtatgaaaatggtgatgttggcagtcaagtacataaattagaaaagattattaagtaatgaaagcatatgcattgttgggcggtccaactgaattgtggcctgaagatattgaagaaaagctggctcaagctgatttagttattggggttgatcgtggtgccttgtttttagaagaactgggaataatacctgatgtggcagtaggtgactttgattctttacacgaaaatgacttaagccaaatagaaagtaatgttcaagacattcgctattctaatcctgtcaaggattggactgattctgagctaatgttgcagattgcttttgaagattatcatgtggatgaattagtgatttttggtgctacaggtggaagattggatcattttttgatcaatctattaatgttgctaaatcctgaaatgagattatatgcgaaaaaagtaacgttgattgaccaacaaaatctaatttgcttttttaatgcaggcacgcatgttgttcaaaaaagaaaaaattattcttatattggttttgcagctttaacagcaatcaaagattttaatattattggtgcaagatatgagttgaagcactattctgggaactatcctcgtgttttttcatcaaatgaatttttgcctaatagtaatgaattcaggattagcttgcaaaatggtatgattgcagcaatttattctaaagatattaatcgttttcatgatttataggttaaaacagaactatagaaaagaaacaagggaattcaaatgaaatatattgactttgaaaaagatattgctggtttcgaaaacggtcgctacgaagcaagacttgaccgtgcaaaataaaatgtagaagactacatgcataagaaccacgttcacatttttgataaaaagaagaaggaagtagctactatcaatggcttagttagaaatgtaacttatcaagatttgggcttgccaactaagttgggtgaaatgattactgagtatgcatacacgccaattgatgaaagaatggccgacgaaattcctgatgacgataagcatcacaatattatgaagtaaagtaaaacggtaagaagacaaaataaaatggtcttcttacctttttttatataaatcattaaaataagtaaaaaaataagcttgcaagatcagtgatctaacaagctcttggtctattaggcacgagtaactttaccagactttaaagccttggttgaattaaaatataggtttttagaaatatttataagctttaaatcgttgatattataggatttaatgttttgcaatatcatagaatttttcacggtgttgcacaaatgttgcacaaacttgattgagtgaattaataattttggcatcttgttgatccttatattcatcaagtaagtgagcatagattgataaagtgattgctatattagcatgtcctaagcgtttactgatagcagctatatcaattccttgagaaattaagtatgaaacatgggtatgccttaaactatggaagtgaaaatcaggtttgttaagtccaatttccttaatggcttttcttaagaattgatttacagcagaactagaaggtggtaatccagttctaggaatagcaaaaataaattcagaattattaatttttaattgtttcaatttatctaataagaaagaattaactttaatctttcgaactgaactttcggttttagttagtcctagtatttttaaattaggattccaggttttattaatatcaataattttattcttaaaatcaatatcagtccattttaaagctgttagttctccaagtcgtgcgcctgtaaataaccccgctagaactaaatatttgctagtataacgaggagttaaatttgttaagcataattgtaccagcttattcatttctccttcattaaggtattctatggctctgacattgtcttgatttcctgtgatggttgtgcgattggtaaaattcttaacgattaaaccatcctctattgcatttcctgcacaagctttaaccataatattggttttacgaactgtagcaggagcatggtttttaccaagccaatttaagaagctttgatatttagctcttgaaatatcttttatttttgttgatccaaaatatttttcaagataatgataattggtaatatatctcttttgcgttgattttctgataatcgggaatttaaaagtaagataccagtgttcaaaatagtcagcgaacacagggttcttaactacatctacaccatcaatagaagcggcttccattttaattccgtactgttgtgcttcagacttggttttgaaaccgccttttgatttttgttttaaaatagaaacattcttttgtttttctggatcccattgagtttctctctttgaaaatcttacataccaggttttgccacgttttcttattgatgccattttatttttactcctatttttgctaaaatagggtagacgaaataagccgattccagtcggtttatcgttactctattacattataagtattattaagtttattgagttgcgctcacttactgttccagcagtaggtgggcttttttgttttatagattaattccacttatagttatcataaacatcaaatgtggaacgtcccatttcattattgtcatcgtcaaatatttgtgcccataaacgattgccaactttagacttactaattaagccataatgataagcatcccatgtagcttctttgttaataccacgcatgcaagtagtcttatccttgtcagataaattaacaaaacgatcattaacttccacagataagttagctttggaattaacagtaactttgcttacatattttgaccaattagtatctggatcatttttagaacggaaagccttaatgtttttaacaattaaagcattagtttggttagctttctgctttttaattgcattgctttttttagccttttgactttcaattctttcttgtctctcaatatttgcggtgctttgctcattagaatgtcttatccataagaaccctcccactaaaaccgcaattattataataaatcctattgcacaaccaacagaaccatctttattgtcttcttttttatcagtcatttgttttggctccttatttctttcaggtttaacgtcactgtggacgttttaaaacacaacagggttatgcagactttgaatacaatagcttcgacaaatatccatttttatcgtgttattatttctaaatgctaatgtatattccaaagcagcattaattgacattccaatagtataatgcaaaaagtttttaagtctgttatgtaatgctgctgagctcattccataaatgtctttcatttgattaaatgatttattcataatttctttttttaatgaatcttctggaacataaacatttgaagcaattatattagcttctgtttcaatgggctgaagctcttcaggataaggatttccttggctcttttgcgcatttattaaagcaacagaacttttatatgtggggtcgtctaatgcttgataagcatgtgaaagctcatgaataatagtaaatattattcttccccaagtattaatacttgcatttaaaaacataattggtccactagcgggaaaaagggtaaagccgcagactctatttgcaaaagtagtacttacttcatcaatagattgcgctgtaaatgaaatatttctagcagttaatccataattaaaatcatttaaagcattttgaccattattttcaaaagggaaaattaaattaggtgtataagcacatatatcgcatgtcccgattatcgaataaagatagttaataaccattggataccttacctctgatttaggtacattgtattttaaagcagtatcttcaactatagaattagcaatatcattgctactttcatatgaatcttctggtattaatctatattcgtatccaggcatattatttttcactctttctacgtcttttaacaatttgctttgcagtgttcatcaaaatacctaaagaatcttgaaaatcttgtttttcttcatttgacattccatcggtttcttttctaaacattgctaaaagttcttgatcatttttgttcagcgttacagattcatctgtaacatcatctaagacttcacttaatggtactttaaaaaaatcagcaaccttttgtgcactagccgttgaaggctttttcgtttcccatttgctgatgattccgttacttaaatccatttttctttctaattcagctactgattttatatcaggtcttctttctttccaaagcctcattacattgtctttcgcactcattttatactcctttattttgacacgacataagaaatagaacaaaatctaaaataaatgcttgcaatttagaaaacgggctattataataaaaactgttcaaaggaaacatagcaaaaaatcttttgaaccgccttttataagcataggtcttacgatttggcttatttcttatactcatataatagaataaattctattataaatcaatataaaatctaagaaaggagtctaatatgtcactttattcagtgattaaagacattgcaaaggaaaaacacaagtcaatttatcagattgaacatgacttgaagatgtccaacggaatgatcagcaaatgggatagaagtatgcccagagctgattcattacaagatgttgctgactacttaggagtaacaacacaatttctatttaagttagctagagaagataaggaggaaaagtaaatggaagctttaaaagttttaggaaccgagaaaatcggcaaattcgaattcacgggaatcgaaggtggatttggtgaaggcaagaaagcaatgcttgtaaaagatattgctttgattcatggcagaccagttaaagcaattaatcaagcgatagagagacaacttaacagatttaaaaatggaatagatatcttagatttaaaagtcgaaaattttgcggtcacattgagtgacctcggatttaatcaagggcaaatcaatgcatctaaacatatctacctactttcagaacgtggatatgccaagttactcaaaattcttgacgatgacaaagcgtgggatatctacgatgaattagtagataactacttcaacatgagagtagcgattaaagaaaataacccagctattgttaatcaagaacgactgaaaattatgaaagataattcagctactcgcagagcaaacatgctttacaagattgcaatggctactgattcaaatagttctaaacagcaattattagcaagagccgctaaagaaattactggtgaaatgatcatccctgtaatgaaagaaaaagagtattccgccactgatattgctaagaagctaggtactacagcaacaatggttggaaaaactgctaataaattagggcttaaagctgaacaacctgggcagaatgagtatggccgctggacaaatagtaagtcacgctattcagataaagaagttcctcaatggctctacacagaagctgggtacaaagcaattaagaaagaggttaaaaaataaaaatggttgaatacgaaaatgttaaagatgcattaaaacaactcgttcgattaaatgaaccaggtactacttttggcaaagcttctaccatcgtagataacggaattaaaacagataaaagagaatttacaattaaagatttacaagattctaattatgagcttttagcaaatgtatgtgatcttctagggatgagtgaagtctatttggaggatgacaatggcagatattaaaaaaatcagctctgaagatttactccaagaactgatcaatagaaaagtgttaactcaaattccggttggcctttataaagaatttgaattgaaacacaaatacaaaaacagggataagcctattcagtgtgatgctgtgtttgttctaaataagcatcgaaaagattcttagcaggctcctgaatcaaatcatcatcgggtaaataagtagacaatgctacccaagaatcaatttctacagggaaattgctatcacgctgaatgtcctcaactaaatctccttcaggagtatttaaaggctctaaggtattaacccattcataaaaactcatataaattcacctcctaattatgagatgaatctagtttaccaaaaatagaaagaaggtgatcatatgccatcaacaatgccaggccgagagctggttcaaaattttcttaaggataatgatattaagattactgacttagctaagatgtataagctttcaaatcaagacgcacgtgactacgtctcaggtcgcaagactaatcctgcagctaatcgattcatcttaacagtcattagtgattttaatcttagatagaaaggagcataaaaaaatgcaaatctcaattccagaaagagttattgccagagcaatccaacagcaatatttcaataaaactgaagctgctaacttttgtggtgtaagcaagtcaacgtttagaaactggactatcaatcatagtgacgaactcattcctacaagtgtagatggacaactgctttacagtagagaaacacttacggattttatgaaagaacgtgaattatgatgcaaaacaaaaattattatcgtgaatttaataaaccgattcgcaaaaataatttagatgataaatttttaaatatttttatctttgtagtacttctagcctcaagccttctagcctatggcttttgggatgcaatttttcaatggatttgaaggagcaagaaatggagcttagtaaagaaactaaagataaattgtgggctgctacagatttagtgacaaccatttatgacttaaacaaaaagagaactaccagccatgatgtggtagttctcaagtaaataatcaaaggacagtataacacatgaaagcaaaatcagaaaaagagttaagaaaagaacgtcaatttatccgtaatcaaaaagcagatgaaagactcaagggactagatgtaattgtttgctactacggtgatgaacgttgcacgattggtcaacatgaaaaatttagtacctgtcgtgatttcattatttggtcaattgtacaagaacctgaagtggctgcagaagacatgggctttgactcgaccacagagatgtatgcgtggatgtttgaaaatggcactgacaatcacgaaatgaagcaattagtcctagactactatgacggaaaggatatgcaagatgaataaagatctaaaagactttcaagattggattaaaaaaatgcaagatgatgctgatgactgggtaatttatctggtctatcaatccaaaaaaaatggcaaaacttattcaggtgcaatgcggtggctgagtaagaataagccagaattgccaggtaaatttactgctgcaccaagtgaaacggtagcaaacgttgtccggtcgatttttgaagaagcaattgtcaaagtaaaaaacgaaggattagatagaaaggtcgacgacgatgattgatcaagattggttaaaagaaagtatcaagcaagaagcacaattaaagtttgctgctagatgggaaaatgcagagtttgattcgtctgaagcaagacaagcctttcaagcaattaaaaatactgatgaatgggaaacgttcaagaaagtaatgactaaagcatatgaaaaaacaattactagtaatgtccttaatcagcttcaaggactaacagatttaattcatgaagcaggtgaagaataatgccggcatttaaatggagcgataaaaaaaagcctaattatagatggcttgtctacggtattgccggtgttggtaaaacaacattgagtaaatatcttaaaggaaaaacttacttgcttagcttagataaaagctttgaaagagtgaaattttggcaaggtaatgatgacatttgggttttagacccagacaatccaattgaagacctcagtgacttctacaatttctttaagcctagcgactatgacaatctcgttatcgataatatcagtagtttgcagaagttgttttttgtcgaaaaggctaaaggaaccaaaacaggattagctaacaagatttctgattataatgaatggaatacatatttaattagatttatcgctagcgtttttaaatggaacatcgatatcttagtcacggcttgggaagcacaaaacaatgttactgatcctagtggtcaagaatttacgcaatatggtccagatatcagagataatccacgggattatttaatgggtagctgtgatgtggttgcccgtatgatccaaaaaccacagtcaggtgagcgtgggttaatcatgcagggaagtatagatacctatgctaaaaaccgcttagacgagcgaaaaggcagcaaagcagaagactttttcaaatttgaaaagtcggatttagaaaaagcggtcgataaagttaaagaaaatgcaaaggagaaacaataatgtttaacaaaaatgtaaatgaagacttaaagctaaaccaggaaatggaagacaaagttgcagaaacttgtttgaagattactaataacgaaatcaagcattttattatcattggtttagatgatgatggaaatgaaattcgaatgcatcatggtcatggcattgtattatctggtctcgttagagatattcaacgagagattgatcaagaaaatgatcataccagaaatgccagtgattttatcaagatgatgcagaaaattaataagcaagatgattaaatgtttcaattatttgattatcagcaagatttagttgataaggctagaaatgctctagcagctggaaatcaaggcgttttaattgttagccctccaggatcaggtaagtcagtagtaatcagtgaaattgctaaattaacagtaaaaaaaggtggccatgtattattctttgtccatcgccaagaactagtaaagcagatcaaagattcttttaaacagcagggtgtcgatttaaaccattgcaccattctcacggtaggtaaagtagcaaatagattaaatattttagccaaaccagatttaatcattgttgatgaatcacaacactcaagagctaaaacatatcagaaaatatttaattattattctgatgttccaaggcttggttttaccggttcaccatggcgtttatctggtaaaggatttaaagatatttattcagctatggtattaggcccaactgctaaatggttaattgaaaataaaaaactggcaccatttacagtctatggttaccagttaggtgataaatcaacgttaaaaagtggatcgacaggagattatacaaaaaaatctttaaacaattacactaagtcaattatacatggtgacattgtaaaatcatggctcaagtttgctaaagaccgtaaaactattatctattgccattctaccagctttagtaaggaagtagcacagtcttttagggatgcaggtataaatgcagttcatgcagatgctaaaactcctgaaagtaaacgtgacaagataatggttgatttcaaagaaggcaagatcaaaatattatgcaatgttgatctagtaagtgaaggctttaatgttcctgactgttcatgtgtagttctattaagaccaacacaaagcctagtaatttacttacagcaatcaatgagagccatgaggtatcaacctaacaaacacgcaatcattattgatcaagttggtaactttgaaaggttgggtttgcctgatactgattacaagtggactttggaagatcgtgagaaacatccacgcaaagatagcggtagtactgaaggattacagattaaaacatgtcctgattgttttgcagttattaaagcagaatgtgtgaaatgccctatctgcggtcatgatttttcaattgaaattagaaaaattaaacaaaagaaagatcaagaattaagagctattaaagcagaaaaattccatattgatctaatagcaaagaaaaaggttagtgaactaaccagttttaaagaattaaccatgtatgcaaaggcaaaacattataagaatggttgggcttggcacatggctaaaaggaaaggatttatttaattatgggttttattaatttaaacgaaaagacaaacaacagaagtgaactatttccaaagggaacttatgaaatgcaaattgtaagcgtccatggtgatgcaagccctagcggtcatgaaaatatgcaatttgattttctagttcgtaaagacttagacaaagtttctgcattagctaatactaatgcaaaaacacatggtcgccacttctttgcacatgtttggactgctaaggataaagaaaccggtcaagattcaggctcatatgatccagcagatttggcaaatattgcagatgcaattggtttaactcaagctcaaattgataaatacatcaagtcaaaagaagatttgatgaaagcatgtgaaggaaaattcattagaatctacatttcagtaggtgagaatacttacaaaggtgaaactcgcaaacaaaatagtaccttcactaattcatggcaaaagactaagttcccaccacaagctgctaaaaagcaagaaactgtagaagatccatttaaaggtaatacaggttcaacagatgaattatccgaaaatgatattccattctaaggagtgaagtaaatgggaaaatttacctatgaaaacatccctcaagaattgcgaagtttaaagcaatggggattgtttcaacttaaatgggtaaaggagcggaataaaaataccaagattcctattgatccttataacggtagagctggtaaatctaatgatcctagtacatggtcagattttaatacagcactaaaagcattagatgaaattgaacgtgctgatggcttggcattctattttactaacggatatgtagggcttgatattgatcatatttcagatgatttagcagattggcatcaaggtgatagttctgttagcaatctgataaacaaattccgtttaatgactgatgaaacttatatggaagtcagccaatctggtacaggtattcactgtatttttaagggagagattccaggcaatcgcagacgtaaaggcaattatgagatgtaccaacaagggcgtttctttgcactaactgggaacagtattggtattcctaagattgtcactctttcaaaagaaaagatgcaagctctttataatttcttatttggtgctgataaatcagtgccggataagattgaagaacctgaaattacagcgctagatttatctattcctgacatcatccaacgtgcagaaaaatctaagactggtactcgctttaccatgttcatgaagggcggctgggaacaattctataattctcactctgaagcagatatggcatttgctaatgaccttgcattttggactggtagagacttccacaaaatggatacgatttttcgtaattccagtttaatgagagataaatatgatgaaaaacgtggtgctactacttatggaatatcccttttaaataaagcaatcagtgaagccgttaatatttataatcctgagcaagatgggaaagagccagatctagtctttaactggaacaaacctaaaaaacgggctgttgctcgttcatgggatgatacaggaagaggacttagattaaatgatcagttcggtgatgtattcagatatatggcagctgataaaacttggtatttctataatggctcatattgggaattagataatggacggcatattgagttagcagctgaaaaagttgttaatttgattaaaactgaaaatcctgatttcagctttgctactcagcaggataaagataaagcaatgaaagaatggaataagttcattaaagaatcacgttcccatatggcaaaaatacacatgattgaggagtttaagaagtacgtaactattgatcacggtgtatttgatcatgacaacatgcttctaaacactgaatctggttatgttgatttaactaacggtgaattgaaagatcatgatattaaaaagatgtttagtgaacaaaccgcatcagaatattcagacaatattgattgtcctatgtggaaagacttcctagaacaaattttcaatcatgatgagaaattgattcattatatccaaaaagctgttggctactcaattacaggatcgactgctgaacaagtatttttcttgctacttggtactggtagaaacggtaaatctgtatttatcaatactatcagaaatattcttggtagttatgcaaagcagatgtcagttgagtcaatcatcgtccacaattcaagcggaagtgctaatagtgatattgcacgacttgaaaatacacgtttagttaccagttctgaagctaatgaaggttcacgtttagatgaatcgttagttaagcaattaactggtggagatagaatcctagctagatttttatatggtcaagaatttgaatatgatcctaaattcaagatttggatggctactaaccacttgccattcattagaggaactgatgaaggtatttggagaagaattaaggttgttccattcaatgtacaaattccagctaacaaagttgataagaatttggaaaacaagttaaaagctgaatggactggaatcttaaattggatcgttcaaggcgcaatcatgtggcaagtagaaggcttgaaagaccctgaagttgttcaagatgcatccaagcaataccgtgaaaacatggatccacttgaagcatttcttgatgaatgctgtaaagctggtagcaattacactatcatgggtagacctttatacaatgcatatcgtgattgggctagagaatctaatgaacatttgatgtctatgactaaatttggtagagaaatggctaagaaattgcctaaaaccaaagaaagaaatggaactcgctatgtaggcatccaattaaagaaagaaccacttcattttgattggaattaatggctgtgattagttgcggttagttgtggttggttgtggtgagtatatgtggtagctcaaaccgttggggctgtaggggtgtgacgtgtttcggttagtgtggttagtttaaaagcctatattattatatttattttcttttttataatttactttttaaagaaaaaagtagtaacactaaccacaacactacaggctgtaggcgtaagacccaccacaaactcaccacaaactggtcacatttttagccaacccaccacgattagcagtctactatattgagtgctaagaaaaataggtgacaaattggcaaaagatgtcatatcggtatttacccattagcaatgctatacaaaaactcaccgctgatattttttgtgacggtatcagttaattcactacacttcatcagtgtggaagtcacttgagaggaaagaatatttaaatttgtgtaaatattgtgaaatcaacccaaagacaaagctaggacgcgactactacagagatgactatgttgatccagatgagattaataaggtgaatggtgaagacggaataatgtttacttacatcgattgtaaaaatcatccagctttaattatttctcatcctgatcctgagtgctattctcaggaaactgacaaaatctttataggtaattgtccctggtgtggacgcaatttaaagaaagaacatcaaaatgaacaatcataatttagctgaataccattgtgaacattgcggcagagaatttattattgctgaaattgatgatattaaacattgcccttattgcggagatatggacattgctagatatagtttgctaacgataactattgattaaaggagcatgaaaatgaaagatgaaaacggacgtgatattaaattgggtcttgaagaagctagacgcataatggctacagattactgtgtaagatcagatcttgctctatgtggtgagttctttaatgaatatggtatgttgcctcaggagtacataaaggagtatggcaatgaaagtaattgataaaagaacgaagaaaactaatgaggattacaagtatggcgatattttaatgtgttgggataatgatccagatgaatataatctgtttagaatctcgactttttatgatagttattatgaacaagatcgttgtattgttgtaactatacacagtagtagtgacaatgaagcaaaaacttgggaaggattatttgactcacctaaagaagcggctagggacttaaagaatagttataaccacgctgaaaaagtgaatgcatacattgtgattactgattaacggaggaataattatgtgcgattactgtaataatgaaaaatcaattatttcaattgaagatacatacgaagatgggtacacaggtattgatagatatgaaaatggagatgtttatattaatggaaatgaattaaatttatcttgtgatgtcgaagttacttatgtatcaaagagtagcaagattaactattgtcctatgtgtgggagaaagctagaaagtgaaaattaaaaatgaatgcagtttcaaaaaaaagcatctgtccatattgtcattttgaaagtggatcagaggatccgatgaaaactttttatacagatggctgtgaattatttatcagaaaagataattcactagaagtggttcttattgattattatgatgacttttcctttaaacttgataaaaaaatcaaattttgttctatgtgtggtaggagattagataaatgattattagtttattttatagagtgaaactattttttaagcaattattttgtcatcacagttatgtatataaaacatcgctgtttagccttagcgactattatatttgtacaaaatgtgaacatgttacatataatcgaccaccgaaggaactaatgaaaagagttgaagacgaatgacatcagtttcaagtagctgctatctttgcagtacattaaatgcttttcacgatggaccggatttatatgcgccaaaaatgaatagatttcacgttaatctaaatgaaatggatggcaagtggtacttaacgattaaaggcttgccttatcctattaagtattgtccaaattgtgggcgaaaattggatgagaatgcaaaatatgaagtaactgattggttataaatgacagcaaaacaatatttcaatttaacattaattttaatgaactggttaatagtcttaatttctttttgttttaaaaatgaaaaattagatttccttatgtttatttggaccagtatatcgtttacatatttaatgcttagttaacaggagataataacaatgacaggaaaaacaattaaatttcaagcaacaacaaataactttaaagtaaatggtaataaagtagttttgcaattagatgcagacctgcttactcataagattaacttaaacaagttaaaagacattgcttttaatggcaatggagttcaagtaagtcttgaggctgatcaacaggaacttattcctgaagaaaacaaggatagtaagccaatgctagttagggatgacaagtaatgaaaactgcactgcttgtattatttgcaattctttaccctacgataagtgtactgaatttgttttcagattataaaaccatgaagtctaacaacgatcttatgaaagaaattcataaaagtaataatttgtttgactctttattaaaagaagttagagccaatgaagatttaacaatagcaatcaaagacagagctaatgcccaagataattttgtttgggaatctgttttaattcttgcacgtcgtattcatgatttggaggacagcaactatgttaaataagcctatttcacatgacaaaaatgggcgaaagatttatccagattcaatcgtatatgatgaagtagcagatgaatatttcttcccatactgcagaaaagacatctggggtgatgattttttagatgatttttatccacttaatccgtccaagcttcgattgattaagcttcatgccagtattgatgacctgaaatcattggcagctagcgatacttcagattcagtctataacattggggatgacatcaatggaaagtgagcatagcattcagaagaaaattgaactagctttatcccagcatcaatgtcatgtgtttcgtgccaatgttggcaaaatcagaacacctgacggtcgattttttactacgggtttgccatcgggatatcctgacttgcatggttttcgcaatgtggatgggaaaatgttttacattgaggttaaaaccaaaacaggtaaattgcgtgatgatcaaattgcttttcataatatgctgatgtcttacaatatcatccacggtgtagctagatctgttaaagatgccctaatgatagttgatggaggtttatgtggctatgggtatgaataaatatcaaaaatctttaatgctgctaaataaaattgaatctaaatatgggtcaatcgttaattgtccggaagatgatcctgattaccaaatgatacgtgatatgtatccttcaatggatcatgaaagcctggctaataattataaaaataaaatttataaattagcgcatgaaggctattctgtcaccgaaattattaataaaatacctggtgacaataaccggatcataaattttataaaagataatgacattcgattaaagacagttttcaagtatcgggttgtttctccggcaggtaatacttattacattactagcttaagtcattttattaattcgcattttaaatatacgtcaaatagtgttagccggatggaatttttaaaatccagaaaatatagggtttatcagggtaaatatcattggcgctttatccgcaatggctgctattatttgccaccttatttagataagtcggttatgcgaactggtgtcgactcgtatgtttatgatgggaagtgattgtatggaagtaacaattgacgcagatacttatgaagaattaaaagattatgccgatagactgaatgaaccaatgtcaatgattgcaactaaagcaattaaacggtatatcgatagctattagttatgaagtataatagacatattacgaattgttatatatctattatatggagttggttattttgaatttatttgctgaagtaaattattctgctactgctaacaatgttgatcgatttctatctaaacaattgcctagattattacgaagatgcggacatgatttaatagatttatcaagtcctaaactatcatgggcaccaagtcatagctcgggtcacaactatgctgaaacatctatagttagtgctttatctattgaacaagtaataaaagctatatataaaagtatctatagttgttcagaattacataagacagtattaatagataactatgtttattgctatgatcaagaacaaattattaggatgttgccttatgaaaagtcgcagtactataaccgtatcaagcctgattcactgcttgaatttgctgatgcatatgactactatcaacagcaatgtgatgtggatgatgataatcttgttgatcttcgtgtttatgcatgaatcggactttcgtcagaaactgtgcggactttcatcggagattgatcggtggaaattagtgcataattgatattgtcgaaaagtgaatgaaattcgacaaacaatcttagatttttttcttcgcatggtcacggttcgattccgtgactatgtttaggaacagccgtgtttattaactgtcataattcaattgatgctgttccatagcatgcgatgacctataatcaaacattaccgcatattatttatgaatacatagcgagcgtgcaaacatgagtcgacttaggtcggctttttgttttgccaaaaggggtgagttgatgccacgaattagacgttgccgttttcccggctgtcatgctgttgcttatgtgccgaatcattattgcaaaaagcatattgagcatgaagcagaactgcaaaaacgtaataatttttatcgattccatagatataacaattcaacgagacaaaggtattacaacaaagtagttcgcaatcgcaatccaattaaagcagagcagaataggttttatcattctaagcaatggaaagacatgcgacttatagttcttaaacgtgactatagtctatgccggtactgtaaggctttaggcattgttaaggaaggtaacgtaattgaccacgtactgccagtggaaaggttcccagatcacatgaaagacttacaaaatcttgttacatgctgtcaggaatgccactactggaaaactcgctttgaagagcaatactatggcacgggtttgcatggtaagccaacagataatccgccaataacggacgtaaaattgattgctaacttggcggctagattgaaaaatgatcacgctgtaaatggctaaaaattagcttctaagagatttaaattttgcaagtgtaattatacatgaatcaaaataaaatcaaccccgccccatattttcgagcctagggagccgcatcagtgccgttcgctcatgtcaaaaagaaatttttagaaaattcttgaaagggggtcgaaaaatgacgaaagttgatctatcaaagccgaacatacctaatcaagcaccgaaatggcttggagaatacggcaaaagattatatccaaaactagccacttatcttaataaaaacgacaaaattttaagagcagatgagtatttattgcagcaatattgttcagcttatgatgtttatcgaatagcattccaagaccttcaagagcatggaattcaacaagcaatatataaaacatctctctctcctgtggatggtaaagtggtcagtaaggatttccagggatacaaaaagaatcctgcttatcagatgatgtcagactctctctcaaagcttaatgcaattggaagggaattaggtctaagtcctaaagcacgctctgagatgctcgatttgaaggcaccaacaagcaaaaagaaatcagctaaagaaagtttaaaggagttttttggatgatgaactggattattaattatgctcaattgaaatattttgaagagatcgttggtttagtgatttgcggaattgtatgtatcgtttggtttgttttgtggttaattttatggtttaagagtcgtaaataatgaatgaactaataggcacaatatttattttaattgctttatttgcgttgattcaggaaggaaaagattaatgctttatttcaagttcaaagatagtaaatggatcaaagctaaatcaagaaattttgcatctatggtttatgagctaagctttgttagttcttttacaccttgtatgggatttactaataatgaaatttagacgatgatgcaaatattttctaaaaaagattaataaaatgttgtttttgttaataaataggagcttaatcacaaaaaaacgtgatttaatcccttattttgctcatttatattgattaggaggtggaatatgcagtgaaaattgatctaactcaaactcatgatgtgggagatgtctaccatttaattgattggaaagaaattcaagaaaaatataatgatccaggaacaaaatattgctttgatgttttagatggcaagaaacaagcaggatacaatattcagttagcttgctttcgccatttaagagacctgcaaaggcaaaacactaaagaatttccttatcattatgatgttaaacaagtagatcgacttttaaagttcgcttctatttcgcctaatgttgatactggtgagcctactaaattaatggactggcagaaatttatttttagtcaaatgatgggctggcgtgatcgagatgatgataaacgatttaccagagttattgtctctgtatcacgtgggcaagggaaaacctatttgatggcaattttagtagcttatagttttctaattgagtctttagggctagaaaaccaagattatttagttgcttccattaactacaagcaaactatgaaaatctttggctatattaaatcaatgcttagaaaaattattaatattgagccatttaaatcattagctaaagatgctggcttagagctacaatctgaacaaattattgaaaagaaaactaataatattttaagagccatttctcatgaagctggacagtatgactcatatcactttagaactgccgtttttgatgaaattggtgaagtgaatacacggcaaagaatttctaaaattatttctggtcaagttaaggttaaaaaccatcaattcgtgcagatatctactgcttatcctgatcctacagtgccattccacgaagacgaaaaaatggttattcaagctatggaacaagatttcaagcgtgaagctgatagctatctaggtttaatctggtcacaggatacagaaaatgaagtttatgatcctcaaacatggattaagtccaatccacttttaggcttgccagatcaaaaagaaaatctattgtctggtttaaaagataaacgtgataatgacttattaactggtaatattgctgattttgagaacaagaacttaaacttgtggctgaaacaatccacagctagtttccttaatctaaaagatgttgaagatgctattgaagatgactttaagattgacggtcgtcaagtctatataggctttgactattcaatgtttagtgataatacagcaatcggttttgtttacccttatcaggatgaaaagacaggtgatccacgttggcacatagcccaacacagttttattccttggcaacaagctggatcaattgaagctaaggaaaaacaagatggtattgcttatcgaacttatccggaatattgtacgattacagcgcatccacaaggtattattaatccagaacaagtatataggtggctcttagattatgttcagaagcataatttgaaagtcgtcttttttggctacgatcgttttggtagttatcaggttaaaaacattactgagagtttaaatgctaacacagggtggctaattcaagatattgcacaaagaacaagtgaacttgctaatccaacaaaatttttacaagaaagttttacaactggtaagatcactcgttttgatgatccaattgaagaaacagctcttcttaatgctgttattaaggaagataagattggtattcaagtagataaggacaaggctactaagaagattgatgttgtggatgctgaaattgatgccatgtatcaggctatgtacaattttgaagattatggcttgatcaatgataaatctcatgaagttaaaagaatgacacaggaacaagtgcttaaatggtttgaaaatcctgattctggtctattaggaggtgaaacgggtgataattaaaacgctatttaaaaatatttggaagttcttagatgtaatcctttatttattgggctttggctttattaccatagctctttttttatggaataaaatagcaggttttgcaggtctaggaattgctttacttttaacaggcttattaattgatctacttccacatggtcagggaggaggtgataaataatgcccgtttttaatttgaataaaagcaatgtatcaggctacagcttaaatgatcctgaatttcttactttatttaagaacgatttatctgttagtgagtatgtttccgcagatactgctttaaaaaattcagatattttctcattgatttcacaattatcagctgatttagtactggtaaaaatgaaagctgataaagatagaacacaatcactaattgataatccttctaatctgaccaatggttttgccttttggcaagggatgtttgcacagctactgttagacggcaatgcttatgcctacagatggagaaatatcaatggcgttgatttatattgggagtttttaagaccgtctcaagttcaagtgatgctcttagaggacggatcaggattaacctacaacattaattttgatgaacctgatattcaaacaaaggagaacgtaccacaaagcgatgtgatccacatcagacttgtatcaaagaatggtggtaagactggtgtttcaccacttactggtttagctaatgaactaaatatcaaagatgcaagcaatcgtttaacactccatgctctttctcaatctgtggaagcaccaggaattttaagtgttactggtggcggtctgcttgattggaaaaagaagtcagctagatcacgtgaatttatgcgtcaagttaataactctgataatggtccgatcgttttagatgatttagagacctatcaaccgttggaagtgaaaagcgatgtagcaaaactactgcaacaagcagattggactggtaagcaaattgccaaagtctatggtgttcctgattcttatattaatggtcaaggtgaccaacaaagtaacatcactcaaattggtggtcaatatgctaaggctattaatcgttatgctggtgcagttcaaagtgaactatccaataaattgaacagccaaattacctatgatgtgagaccagctattgatgcaactggtgataactttgcatctgaaattggtgatttatcaagtaaaggaattttatcaggtaatcaaggacgctatgtattacagcactatggttatttgcctgatgatttaccaactcctgataaaccaatcattccagtaaatgaaggaggtgaagacgatgacaatagtaccagtcaaggggataatcgtgcctaatgatttaactgatatgtatacattcttaggttatgaaaatttaactcctgatgatttaaagcaatcactgaatgatgctaatggtcaagatatcacattagaaatcaattcacctggtggttacattgatgctggttctgaaatgtataccgatttaaagaaatatccaggcaatgtaactgctcaagtagttggtcaagcttgctctgctgcttcatggattgcattagcggctgataaagttgaaatgtcaccaaccgctcaaatgatgattcatagagtaagtgttggtgttgaaggtaatgtggatgatcttactagtgcattacaatcattagattcaatggatcaaacctatgttgatctttacagcaagcgaactggtttagataaacaagaaatttaccgtatgatgtgtgcgactacttggatgaatgctaaacaagcggtagataaaggttttgctgattctattatgtttgagaatgatcaagcaccagcggttgtgaatgcttacggagtacccgttttaagtgacaatgcaattcgtaagattaaagcattaattcatgataaaaagtccaatgctgactctaaacccattgaaaataaacaagaagatacagataaggggcaagtcaaaaaagacttgtctcttttattgtggcaatagaaagaagagaacacatgaatttacaagaattacaaaatgcctggattgaagcaggcaataaagttactgatctctttaataagaaggtagctttgcaaaagaactatgaagcagatcccgaatccgtttctgctgaagatatgaaaaaggcagctgaagcttataacaaagcggttcaagctcgtaattttgctaaacaaaattatgatgatgctgtagaagctcaaaaggttaataaaccagcatcaaagcctattgaaaataagactgaagataaatcaaaggatgttatttctggtttcaaggatatgcttaaacatccaatgaagtatatggaaaacttatcatcaagttcaacttcagatggtaacgctggtttgactatcccagacgaccaacaaactcaaattaatactttgatgcgtcaatatgatgacttacgtgatttggtaactattgaaaacgttggtactgatcatggaactagaaatattgaaccattttcaaatattaccccaatggatcaattggatgatattcctgatgattcaactaataactcaacttacgcatggcaagataaagatattaaggaaggcgactatagttctgttaagcaacttagttacaacatccacgactacggtgatgtattctttgcgcctaatgatttaatcaatgattcaaatgcaaatattgaatcatggttaaaccaacatattgcacgtaagaatgttgttacctataattcaaagatcattggcttacttcctaaatcacaaaagaaggctactattactaagctcgatgatattattgatgctttaggtcaattagatatggctttatggggtggcgctactttattaactaataaatctggtttcttagcattagctaaagtgcgtatgtcagatggtacacgtgcaatgagtgtagacccacgtactcaacaaaccactttcaatatggacggcatgcaatatgtaaatgttcgtgtcgttgaagatacttggttacctaacaacactaatgctagtggtaagtaccaaagccaccccttctactttggtaactttaaggaatttattcatttatacgatcgtcaacaaatgtcattgcttacttctaacattgctgataaggcatttagacgtaatcaaactgctattcgtgcattgcttagatttgataccaagatttgggatgatgaagcaattgtatctggttcatttgacaaggttgagagtcaaccaatgcttatgcaatcagttcaagttccatctgataacggtggcactcaagctggatctgctaatcactaatagaaattaggtgatcaatgatgaccacttacttaacagttgatgatgggcttaaacgctcacttggttacttacctgacgatgatgcgcttgattctagtgatgaagaacgtatgaaaacggcattgaaaggtgctgaaaattatgttcaaggcgcaattggtgaagatgctgatgaaagtttttacaaaactgaatcagtatttgaactgtataagttagcagttaatgcaattgcggctaattggtttttgcatcctacatctgctgtatcaagtacaacggctaagcagattataggccaactccgtggggcctatgatgaaacaaaggtggtgaatgacgatggtacaactacagacatgggaccgactgagtaataggatcacttttggtactgtagaagatagtgaagatgataatggacttcctactaatgaatttaaagcattaactagccctactttatgtggtcgatggggcttaactactactcaaatgattcaaaatcaaggacatcatcacgatgaatcttttattgtcgttattcaccatcgcagaaattatgatggtattactcatgctcaatacaatgggaaattgtatgaagtgagtgacatcaatcttgatccatttcaaaatccaactgcaggcgatctcataactctcacaaaagtgacagaccgtgatggttgatttagataaaggcctaaatgattggctagataagatcactaaaaaagttgatctatctactagtcaaaaatcagctatcactggtgaaggggctaagacttacgctgaagtgcttaaaaagaacactccaatgtctcatacaagctatgcacatgcacggtcagctggtcatggccgtaagtctaaacacatgcgtgacgctataacttataaagcaggttatgaagtcaacgatggtaatactggtgatacttcagtaggctgggaagataaatataatgcaatggtcgctcgttttgtaaatgatgggacacgtgatatgtctcaaaaagaaatatccaaccttcattttaaagatcatgcagaaaaggaagctgcagaagcagtactaaaagctaatgctgaaaaattcagagagattttagataaatgagtactgtagcaaaacaggtagtagatttgctaaacagctctaatcttcctaaattgcataaagcctacagttttgcagttggtactagtgagcgtactccacgtgattctgtggatatacttgttagtgaagtgaattttgattttacagaatcaggtagtaaccaatacacggaacagatacaacgtttagcgataaacgttttttatagtaaaaacacaaaagtaaacatgaacgaatttgaacactcgctcatgtcttttttcgtagctaatggttggcaaatcgtagctagttttacagggcacacatatgaccctaattctggtgagccaacaattagctttcaaattaaaaggagagaaaaatggaacttcaaggtttaaatgatttacttgttttcaaatatgacaaggacggtaagttagttaccgatgaatccaaaggtggtttgaccactaatattggtaaagatggtgtatttaagattgatttggaatcatctaaaggtgctactcaagctaacatcactggtttaagtcgtactgcacaagctgtctatggttctaacgcaaaagctgaacaacactttggtgcatatcaaattactggtacttttggtgctaacgacattccgcacaatttctatgatgcaattgtaggtcttgaaaaggacagcaagttaggctttgggaacatggctaaggactcaaccccattggcatatggtggtgttattgctcactcatataactcaaacattggcgttgatctttactttgcgttgccatatggcaatttgaaacctggcggtgatttaactatgggtactgataatgaaaacccaactttggtacacgataccttcactttaaatgccgctgcacgtccatcagatggtttggtttacgaaaaattctattcagatgaagatggattcgacttcgacaagatgcttaattggattatttcaggtactgtaactggttcaactgctgatgatccaactcacaagggacctgatgatgctactcataaggacactattccttcatcatcaactactcactaataattagcagggtgggtagtggtggcaaattaatatcaatatctttgtcaagaacggtgtaaaagccgttcttttcttttttgaaaggaatatcaatcaatgtcagtaaaaatcaatggtaaaaagctacacttaactacttttgaagttgaaacaactgtaaaaaatgtacgtgcatgtcttaaggcacaaaagacttttgcagaattatcaattgcaattaacaaggtcaaagacgatgatgatcaatcaattcttgatgtcttaactgcacaagaaaatcttttggatgaagaagaaaagtttttaaagaagattcttcatttatcagatgcacaagtagataagattgaagattctgatccaggtgatgtcagtgaatttgttactgacttaattggaaaaatcttacaagtagacgattccaaaagcgacaatgcttaatgatcctgatccagtacatgcctatgaggaaatgctggaagactttgattatcaagaacaacaaatgattgttaatgctcatatgtccttagaagattatgaaaatactgattactaccgtcttgtggaagtaatgagtgcaagaccaaaggacaaacgtccaatgaacctatgggactttgcagcaagtttagacaaaacagaaaggaggtaaaaaatggcgggaagaataccagttggttcactgattacagatattaaattaaatggtgatcaacctgtaaaaacattaaggcaattaagacaagctgtatctagtactactagtgcatggaaggctcaagaagcagttttaaaaagtactggtaaaactactgaagcggctgaagctaaatataaaggtttaagtgaagctgttaagaatcaacgtaaatatattgatactttagttgaaaaacaaaaatctttaaagaaacaacaagaagaaattgatgcttccacagataaaggcaaaaaggcttatgaaagtatcagtactgcacttcaaaagaatgctactcaaactttgaaagctactagtagattagaatcactgactaagcaacaggataaggctaaaaactctctcacttactacaagtcaggattagcagaagctcaaaagactttaaaaaccactacggctgtttcaaaatcgtatgttgatcgtttggaatctgaaggcaatcattataaagctaatgaagctagaatttctggttatagaagttcgatcagtaatttaactaagcagtatgaaattcaatcacgtgaattaaaacgtattgcatctgaatctggtgcaactagtgaagcttacaagcgtcaacagatcagagtgaatgaaacagcgacttcattaaataaagcaaaatctgctgttagtggtcttgaagcagaacaaagaaaaatcaatcctacaccatgggatagattgaaagctaagatttctagtgttaataaagaaagtcaagaaactcatagaaccttgaaagaggtattcatgggatccgcacttggtaacactgtttcaaatgctgtttctaacttaggatcaagccttaaatctgcttacacagagggtatgaacttgaatctagcaattgctaagatcaacggtaggttcaaaggcatgggtatgaataccagacaaattcaagcccttgataagcagattggtgagttaaagtccaatactgacttagctggtgattcagcatcaaacttacaagctcatatgcttaactggagtagcattggttttaaaggtgctatgcaaatggctaaaaccattgcaggtgtaggtgatagttcaaagatgactggtcagcaaattgaccaaatgtcagctggtttacagcgtgttggttctactggtaaagttacttattcctccttgagccgtattaccaaagctgcacctacctttatgcaagcactagccaaaggtgctggtatgtcagaaagcaagcttagagctttgcttaagactggtgatgtaacacaaaagcaattccaaacttggattgctaaatcatctaagtatgctggtgaaagctttaaaggttatggtcaaagtcaagctggtgctttaaaggctatgactgtagcacgtcaaaagttggaacaagaatttactaagccaatttttgatgctaagacttcaggacttcaagctttaaagaacatcatgaccagtaaagaagtcatgagcggtgctaaccaactaggtaaagcgatttcaaacgttattggctacttagataaaaataaaggtgatattgtagctatcactaaaaatgttgtttctctaggtgtggaagttggtaaggctgtttggaaagactttgcagctattatccaaaatattggtaaagctttaggtattgttaaaggtaatggtaaagattcaagtagtgcattacatacgcttgctactgctactgctgatttagctaaaaataagactgctgttaagactatatctgatgccataattgcaatggtagcaattaagggcattggtaaagtcagtggcggtcttttttctattggtaaaggtgctgttactgcttacaagtcagttaaagcattaagatcaggatttaaaggtattgagcttgctgaaaaagctactaaaggtgaaaaagcttgggctaagtttggtggcgttctatccaagacttttagcggctttagaaaagttggaagtaaaacttggactactgtagaaaaagctggcatcaaagcttggacaggtattgaaaaaggctgggttaaagcaagcgatttaggtacaaaagctggaaaagcaatagctaagggttttagagctacaggaaatgttttagcaaaggcaggcaaatggagctggagcaaaattaagtctggctttaattttgcaaaaaagtttggtcaagaagtaggcaaaaagatttcagcaggaattaaagctactactaagttctctatgggtaagcgtcttgctactggtgctttagcaggcgctgcagttgcaacacctgaagtgataaatgctgttaaggaccgtcacagtgctaatgctagaagtcaagacattggcggtgctgttggcgctgtcgctggtggtacattaaccagcatgattccagttgttggtccaatgcttgctccaattggtgcaattatcggtaaatatgctggacgttggggtggtcaagctgtcaataatttcaccaaaggttggcagcgcaataaaccgcctaagaaattctggagtttagaaaatttaggctggtcaacccatgatacttttagaaaagtaggtaagtggggagcagatgttggtaagaagtttggtcaaggattaagaaaaggtaagtcatttgctaagaaaaactctaaagaattagcattgaccgcagtttcacctttgttaggcattccagcactgctttacaagaataatcctaagttcagaaagtgggctaatggtgttggtaaaaacatcaagagtggtttaagtaaagttggtaaagcagttaaccacttcaagagttcattatccaagaactttaagaaggcttgggataatgtctataaacatagttctaaaggtactaagcagattatgcggtctgtttctcgttttgctaaatcttacataaagactaatagcaaagccaataaagaaacgattaaaaactttgcttcatttagcaaacgtttaaagaaaaatcacggtgatttgtttaagaccgttggtcaaactgctaaaaaacaacttgctattgagaaacgaagatggtcagctaactggaagaatatttcaagaactgctaaaggaatttggaatggtattcataagaatgcttctgatttatataggaaactcaattccgccacacatggtggactaggcaaagtttttagtggttttaagagtttcggcaattctcttaaaaacttctggtcgagtttattaaaaggcattcaaagtacttttagtcatgctattgataacatcaaaggtgctgccaataacgtcaataagttcttccacggaaaacttaaggttggatcacttcatttagctagtggtactgattggaagaagaaatatggctatccagctatcttaaatgatggtcatgattcaccagctactaataataaggaaggaattttaaatcctgatggttctgtggaagttcaacagggtgtgaatgtaccacgttggatctttccatggcaagacgttattaatgctcgtgatatggctaagttgtttggtcgatcagttcaccttgcaaatggtactgttgatctttatagccttgaaactaagaatcctgttaagattcttactacattaactaagcttactaagaagaagtacgatgaagaccgtttgcgtcatcaaaagcaaaaagaacgtcatgataaaaatgatagtgctactgctaatgagcgtaagcgtctgattaagcatgaacaagatgataaggctgatagagctaaagtcgctaaagaaattagagacgctctaaagcgtggtagaaataccaaaggcttaattgcacagctaaataagcttactagtcgtatcagtcaagaacgtaaagctgttgctaagaccaatcctcatcacggtgaaacgcttgtggatgaaggattgttacttggtgctaatagtcgaattggcaagtccaagtggatcagtgacgctttatttaagaaacttactactgctcctaaaacaaagaagactaaaaaacgtaagaccaagaaacgtaaatcaactagaagaagatcaacgtccatatcaagacgttcatattcatctggttcaagtcgtgtttctgtgccaagtatcagcgcttctggtgcatcacttaaaggtttaagcagtaaatctatatctgtaactgctaaggtaaaaggatctaagcagatcaaagcacttgaaaaggctatgaagcggatcaagggtggcactcacaaggttactgtaaaaaccaagggtgctaaatctgttaagtcactctctaaggcaatcaagaagatcaaaggcaaaaagaatactgttaatgtaaaaaccaaaggcactagtcaattaaagtcattgcataaaaacattaatactgttgaaaaacgtcttaatgttttagctaagactgctaagaaagataagtttggcgaacaaatttctaagcaggctgaaaaggctgttaagtcactcgaaggcaaaggtaatttcaccaagaaaatctctagcatgtctaaagcaactgttaaagatttcaagtcaatgacttcaagtgttggtaaaactactgataagatcaggaaatcaactgaacaagactttagtaatctttacaaacgatcttaccaatctgttaagagattgcacgatggtgtaatcaaattaggtactgctactgctcgtggttttggcggtgcaatgcataaaatggttggttatgcatctaattcaatgcgtgggacaatcaggcaaataaatagaggtatccgtggtattgatgctgtattaaagcaatttggtggtaatagttctgttattaatccagttcactttgctaagggtactgatgcaaatggtcgtttaactcatgacactttagcagtcgttaatgatgctcaatctggtccacgtcaagaagctgtagtaactgatcaaaatgacattattattcctcatgggaataatcgtaagatgttattgagaaaaggctggggtgtacttaacggtactcaaactcaatcactctcacttccacactttgcaaatggtactggcattagcaagaaagaacttagaaagttagcagaaaacagcttaaagcactttattgagagctttaaatcaatgtttaccaataatcttcatgatgttggttctgatttaactaaagattctactgatttgagtaaacgttctggcactcactttggtaatccatggtctcaagccatgtggacggttatcaataaagctattggttctggtggtggttcacgtgctaagttcttgcaatatgctaaggatacttttgacggtgttaagtatcaaatgggcgctgcgtcaaagaccttatctgactgttcaggtatggtaatgcaggctttacgtcactttggaattaacattggtcgtactactgtggctatgcaagaatcatcaggtgttcaatacttaggtaaaaacttatctaaaacagagcctggcgatttggtcatttttggtcatggtactggtgcagctggtcacgttggtattatcaataacccagctaagggtacaatgtttaacgaaacgccgccttatgcacgtatcagtaaaatatctgatgctatgtcaatgggctatggttactatcgtgttaaaggtcttcatgatcaatctaagcatcaacctaagattaagcctagtttgttagctttagccaaacgtgaattaggtggtaaagcacttaattggattggtgatcatttatccgaaaatgaaggtgcagttgctggtaaacctattggtgatcatgctcactggatgaaacaagctcatattcctgaaagagattgggcagatattaattacattgtttctgctgaatctggttggaatccacacattgtcaaccctagttcaggcacttatgggttagggcagatgcaaggatataacttgcattactacactaaacacggtgctaaaggtaatgccattgcccaactgatgggtatcatggattatattcatgaccgttatggtacagttgctaatgctgttcgatttagaaaagcacataattggtacgcaaacggtggtattgcaagttcaccaagtatttttggtgaagcaggacctgaaatggctgttccactgattccaagtaaatccacaagagcgtgggaattgattggtaaagctgtaggtattcttagtgctaacagcaatttaagtgctaaccaacaacgtatttctaataaagatgaaaaagatgagcatgacttattacaagccatgcttttagttttgcaaaaaatgagcgctcaaagccgtgatattcatatcacacttgaaactcctgaaggtcgcaagctgtgggagttagttgagccgttctacaagcaagaccgtagacaagacatgattaaagaaagaaggggattaagtgcaagatttagatgataatgtgaagctgatttttcaagatcatgcttcaacagactttggtatggtcgttcaaaagccatgggatttgattcatccaactccagatattgatctaacgcacattaaaggtaggaatggagattttttacaaaataaccaatcttatcaaaatgtgactgaaacctttaatctgcaaatccttagaccacctgaacgtggttggtttgattgggaacgttctgtaaccgattggctctctgctccaactgatcctgatggacggatgaagtatcaatatcttagatttactgctgatcctaactatgtattcaaggcaattgtcaaagatccgtttactgttactaaagatgtaactagtgattttgttggaatctgtgctattcctttctgctgtgaaccgttccaatacagaattgacggcattgcttatattccacttcctgatagtggaattgtagtaggtgaagaaaagtggtctgctattccagattggcacttcatagcaaatggtagtttcactttgtatgtcaatgacttgccttacacgtttgagaatatggaaggtgaattttggcttagtggcgctactggtgatacttatgatgcagatggcaatctatacaatacacaaactcattttcctaaccttgatcctcctaaattgtggaagggtcagaatactatcactgttactgctgaaactggcactactatcactaaagctgaatacaaaccaaattggaggaggttgatctaatgaaattaactgtaggtaaaattcctgaagttgattatggtgactactctgatttgatgacaatgccacatctttatgacagtattgccagtgattttactagtagcggtattccacttcctgatgcaattgattgccaggtaaatggaaattccaatcagttttggtctttaactatgacttatccaagatcaggattgcaccaaaaggaaatccaacctaacaaatggattatggaagactgcgatcctaaacacgtgcatcaatggtttaagatcattcacattactcctgaactagacaatgtagtagttgaagcggaacacattagtgcgttacttgttaattctactgttgctgatgatattcaattaaacggtgcaactgcacaagacttaggcaatcaaatccttaatcaaatgcaggagcagagagaatttactttctattctgatgttaacaaagtaagtaaagtgaatattcaaggtggtcaacaagcaagcaatttgttcattgatcctgatcaggaaggtgatactgctactcaatcagttttaggactgtttggtggtgaatttgattttgataactggaatatcagacattcaaaatgtattggacgtgattctggtatcaaggttacctatggcaaaaatatcaaaaccacctttagtcaagataagaacattcagaacatgtatactggtgcagtatttgtcgctaagtatgtaccaggtcaagcaattgcgaaaaatgattggcaaggctgggctacatgggaaagtacttacgattcagtaggtatcacttacatggctggcggtaatatcaatatctatgattgtcctgtagatggtcaaaagatcattggtactttgcaaaacgggatgaaactgcacttaggtcagattgttaatgatggttcattcactcctgatggtaaatatcaaattaacactgttaatagcgatagctggtatccaattgcacaaagtgatggcggtggttggattgattctaagtggatcaattttgacacatcaggtgcttatgcaattaacaatgtcagtgggattgtaactgttaagagcagtaatccgcttgatagtgaaggcataggtagtcgtgttactgttcatggttctgctgttgtagcttacggtaaaggtaaatcaattagagtattttattcacctgaaattggtcctgatcatcatcctgttaagtcactaggtcaagactggactgttaaaaatggtactgttattgattatgacatgattgaacgtaattcaaatggtgatttgtggtatcgcattggaccacatcaatggttattcggtccacacttatcactttctgaagaaggcagctaccgtcaatacagcaactctggttatggttatgttaaagatggtgctgtaaagtatcactttactaaagaccataaaatggtgtcatcaaatacaacagttattaagcatggatcacagaaaaaggcatggaaatgggtaggcaaaggaaagcataaacataaagttactaatggttctcattggaaagaaaaagaaaagaaggtcaaagttactgctaaaaaaggaatgtctactattgataagacaatcactcaaggcggtaaaacctacatgcatacaagccatggttgggtagaatctggttcaatcaactacaccaaagacggttcagttaaaccacatagttttgacgacttcattaataatcaacttaaggatcattctaaggtcgaaatttatgcaacacctgatagtaagaatgctttaaactggtcaattcctaatggcgagacattcactgttgttaatggtcatgaagctaaatctggtgatggtaagacatatgttgaagtaacttacaaaggaaaaactggatggctctgtgaagatgatattgatgacaaaaattcaaatattacatctgcagatgctgatacagataattccgctgatactgataccaactacaacgcaaatgttgatcaatctaataaagaagtgactgttaaggttggtccgctttacgctgaaggatttggtgtaaatcctaacattgatagcgttaatacggttgatattagcagctacttcaaacatgacgatcaggatttatcaggtcagcaaagtgacggtagctttgttgctacacaagctgatattgatcaagccactgaaattggtaagaactatttaattgaacacagatatggtcatatgcaagttcagacatcacttgattatcaagacatgtcagacaatgatcaagactttactcaattaagcctttatgactatgtggatgttagttttcctgattatgaaattactgaaaaagctgaagttacagctacaacgtgggactgtttagcccacgtttttttaaatgtaactttaggtgatttacctactagttatgaacacctacttgttcaagcaagcgaggacagaactaatgaaaagattacttccacacggcaagcaattgctagatcaaattcattcattggtgctgttcaccatgcattaactttgcagggggcatctcaagaacaagcatgggaaaaccttatggttcaactaggggatgcacaatacgtcactgataaaaagactggtaagcaaaaactggtgcttggagaatcagttaaagtatttgcaaagcatatgcaagaaatggctaacaacattgataattttgataatttcttaaaatcaggcggtggcggtatgcttgaacctatttcaagtgatggctctaccagttggaataatgtcatggcaattagagctaaaaacaatgatggctcttatatggaatttaatggcttaggtcttagtttccatgatatttatggcaatccacatgctttgtttggtattgatgattcaagtggtgaagtaactggcaatttctttgttgatcaagctcatatccctattttggatgcatcacacattgagactgatacaattacgagtttgggaactattaatggtgttttacacgttgaaaaccatggcatttcaattgcggttggagatgccactaatttactaaatcctagtcaggaaattggtggtttgagtttagattctcaaaattatactttgaatttgggatctggatcagtaaatattcatgataaaaatagtggtgctattacacacattggacctaatcaagcacagattggtggtaggaatgttgttgtaacaagtagtacagaatctactttaggttcatggattaagcaatattggcgaggacctagtaagtattggaatttataaaaatgaacacattagaacaatatgtagcaaatgaattgggaactattattgcaaaccaatccattaaaatagcaaaactagaaaaagaaaatcaaagtttaaggttaagaaatgctcaacttcaagacattcacagaaagaaggtgaaggaaagtgagtctaagaccgataacgttaaaaacggataaatcaataactcccgtgtcagatgacacaagggttttacgttccaccgaaaaaggtctggtgctggacgtaacaattttaaatgaagatgattcaccatacgatctaacaggtaaaaatgtttcattttcagaaattaaagagagtgatcgtgtagttgctgatgatggtactggtgagcaaagtggtaaattcaacatgattgatcgaactaaaggacactttagttatcaaatgactcaccaatgttatacagccagtggcacttgtttctttcaaattaagcaaggcgacactattgttgatactacacaagatttctattttcaagttaaagttgatccaactgttaagcctatcaatgatagttatgtaagtagtcttattgctatggaaaaccacctgctaggtgctactcaaaaaacacaagctactattgatcaattgaataaagattcaagtaatgcacaacaacaagcacaagcagtacttactaagattaacagtgattttactgattactctattaaatacaataaattatctagtgattggactgctgaagctaaatcaattcaagacgctgcaaatcagcaattagctaatcttaaaaccagtaatcaagctgacataactgcagctgttaagtcaattactgatcaacgtgatgctgctttaaaacagttaaacgatgataagactaaagcacttgctgatttacaggcagactacaacgcatggaagacttccacagctaaagatttcaatgatactgttcagccacttaaagacagcattagtgaaaatgaccaaaaacttactactgtaagtaagcaagtttctgatactgtagtgtcaatggattccttgaaacaacagtttgacaaggtagacttttccaagtttgttacaggggacaccattaaaaattactacactaaggaagaaactgatttaagactacaacaagctggtaaggtaaaatctgtagataatattcaacctgattcaaacggaaatattaatacagaccactacactaaggatcaagcaaatcaaaaacttgccactaagctgtcgtttgtcaagagtgacagccctcaagcggcttataaagcaagtttgaaaccagcagcagatggttcaccagtcattgcaatttatgacatgaatgatgagcctggtgaagctgttattgctggtcaaaaaattacaatcagcactttaaatgacgctattaaggctcttcaaactcaagtgagcggtttaagcaacttacaaagtttgattgatggtaaagctaatagcgctgacgtttacttaaagactgacatcgacaattttaagaatcagcttgaatctgaaattagcaacgctggtaagcttaaaactatcactgtaaacggtggcgcaaagataagccctgatgatagtggcaatgctaatatcactgttgatttatcaagcaaggttaaccaaacggatctgaataacactaacaacagagttacagcaattgaaacaggatatatgaaaaagcctaccgtaattagtaaagctgactacgataagcttgctactaaagatccaaatactttgtatgaaataacagaataaagaaggtgaccgtatggctttaacgataaatggcaaaaaagttctaggttatgctctaggtgaaaatgagtttcttaatggaaatggagcagaaaacctaaatattttttatattgatggtgataataacagggaatggaaccatcaatcttttactattgatatgacaaaatattttagtcaagctgatgtaaagtattcggatgttcaatattaccaaattattgtaaaggtattttatcaagatgctggcaataatactcttgaaaacaattttcgcacaccgttattgaaacgcggtgaaataaataacaagcgaagtgataatgaaggcagtcccggagctatgtcagtttggtttacggacaacaccacattagctgtccgtacaaaatccgattatgacgacactttaggctattcatatactaatctggtattggcggtgtatggctttacttctcaagatgtaggtgctggtctatagatggcagcacccaatagatattcatcgaagaattaaagctgtcgttcatgataaacgacagcgtacttaagcgatacattcgcttattttttatatcttagaaaggagtttttatatggctaatatttttgcacctggtggtcaagaattggcattagcaaaagacattgttcgacctaatttgcttgctaattctaaaaaatgtgagataagaacaccagcaggaaatatacagtttggcaaattcattaccctaaaccctaataatttaggatcaatatatttaactgatgcagcttcaaataaaggtattcacaaagacgcaactacttatttgccaatagagcaaaacacatattatgctcaaacactatggtttaccacagatgctcaagttattcttagtaattttgcttcaaattacatcttttactcttcaaatggctctcgatatctcttgtcaggcgtagaagcacatcaaattgttggcaatcaatataaagtatctggttattttaattccaagacaaatagcgactttaatcttggctatattggcaatttttctcaatgtttgaaaatcgcatcaactgctcaggttagatttgatgctttaaaagtagaaaaaggtactgaatcaacagactggtgtcctgcctatgatgattatgtaatgcaatctgatttagatgatcttaaaacacaaattgagcaattaaaatcaaaataattgaagcccacgatggctattttttatgcaaaaagcatagttaattaacactgtcgttgatattgaacgacatacttatttaaagaaaggaaaataaaatggcagaattaaatgaaaatacattttggatctctggaattattaatggagaatacagagagtgtgatggtccatataccaccacaaaggatatgagtgataaaggctatccttatgtaactaaaactccaaatccaaactttacacatcaaaagtatgactacacagctcatgaatgggtagacacttcagatgatgctttacttcacactgtggaagatgtaaaagaggctgttactgaattaaaatcaaacagtcagtcaaatactcaatcaaatgatcaacttgataagaaattagataagcttactactttggtcattatgtcaaatgttcaagtaggtgaaattagaaaagaattacaagcggttaaggctcaaaaccagtctgcagctgctactcaacctactgaaccaacacaaaacaccacaccagaagttgaaggaggtaataagtaatgtttgagatttacaagtttgaatttgataacgattttatcagtcaagatgaattaagaagttacattgatatgggcttaatcagtgaagctgaataccaagaaatcgttggtggtagcaatgaagaagctaaaccagtggaaggctaaattaacaattagaaattgtgaactgctaattggtctttttattttaggtaagggtgtttggctgtttcatgatagccactatttcatttatcctccacagtttgagaatattgaaaacagcagatacattgactgcttcctaattttgttaggaatcttgttaatgctatctgcttttttagttccgtatattaacaatattaaatacaaaatcatactaattattgctagtaaagtatttcttgtaatagttggtattgtttgtatggttttagcattattgcaattaacgcatggcatctttactacattctatcgaatggggcattcagcatggggagatctgataatttttggatttgtttatctaactgcttgtgatgcctgaaagtgggtgtcatgagtgaattggggatacattattacagcaattggtggtgtgatcagtgcaataactcttttttataaagcatttgatagtagcaagcaacaatcactcaccacactgttacggcaaaaggatgaagaaattaagcagaaagaacaggatgctgaaatctacagaagaaaatggttagatgccgaaaaagacaatgatgaattaagagagaggttaaaaaatgacaattaatcaaatcatggatttagtaatcacaatttcaagtgtagctttggtagtaattgtagctatctatactaaacataaggtagaaattgaccgtaaagctatgcaaggcaatgaacttgctaaagctgaacaattagtggctaagactgttgaaccgcttgtatatcaagctgaaaaatcaggcggtgatggtgatactaagtttactcaagtattgaacactgtacttggtattcttgatttagctcacttaccacatccttcaagccaatttattggcggtgaaattgaaaagagtgtagctgctatgaaaagaacacaaaatttgattgatactgtagaagataagccagtagaccaagataagaaggctgatactaatgcttaaaatgtgtgacgtgtactccgatagtcctcgtagttttgctacacaatcaggtacagatattactatgattaaggcaacacaaggaacgtggtacgtaaatcctgaatgtgacgtagattaccaagcagctaaaaaagcagggaagcaattaggaatttatcactattgtgaaggtggtaatcctgaagcagaagctaagtatttttacaagaatactaagaattacgtaggtgaggctgtaccagctgttgactgggaatctggtcaaaactccagttggggcaattcgaattacgttcgccgttttgtcgatgaatttcatcgacttagtggcgtgtggccgctgatttatgtgcaagcatctgcattaagccaggttgcaaattgcgctaaagattgtggtctgtggattgctagttatccatcaatgaactggaagagctggacagtgccgaacatgaaagttaacacttatccatggtcaacttacactatttggcagtttacaggtgataatatggatagaaatttagtaaatacgactaaagaaggctggaaaaagttagctaaaggtagcagtaaaccagctgctaagaaaaaatcaacttgggttaagaaatcaggtgagtttatcttaggtgaagccttagcaattcacaaagaaccccacattgattcaccagctatcgctaagcttagcaaaggtagcgtagtgaagtatgatgcaactttgcaaggcccactaagattgtggttaagacagccacgatcaaacggtaaatgtggttatatcgttgctaaagacaagtatggtaaagcactaggaaaatttagataggaggaaactccaaatatcgtgcaataagccaccttggggaactatgtccctggggtggcttttttgtgttgtcactttatataaggaagaaaaaataatttactgttgcacaaatgttgcacaaaaggtttttaacttaaatttaggtaaaaaaataagcttgcaagatcagtgatctaacaagctcttggtctattaggcacgagtaactttaccagactttaaagccttggttgaaacccatacgcgctttggcttaccgtcaacaagaatgcgaactttttgaaggtttggcttccaagcacgacgagttgagttcaatgagtgtgaacgtttgttaccgaatgtagtcttcttacctgttacgtaatcttttgccatttgctaaacctcctttatttgtgatgtcatacttaattagattatcatatgttttcgcgcaattcaatactaaaaggattttttcaggtgtattttaattattgattatgtcgttactatgataaaataataaacgtatatatagataataagacggaggacgaaacatggctgttaagatcaagacaaaagatggtttgattgatatttcaaacggtgtaatcgcaactgttgttggtggcgcagctacgtctaactatggcgttgtaggtatggcatcaaagaatgccattcgcgatggatttgacgggattcttaatcgtgccaattataagcgcggtgttgttgtcaagtcagaagataacgaaattacggttgatgtgtacattattgttggttatggtttgaagatttctgaagtaagtaagaatgttcaagatagtgttaagttcaatttgaagaatcaattaggaatagacactaaggccgttaatgtcattgtacaaagcgttaaggtacttgacgaataacacaagcggaggttttaaatagtggttttaaatgagatagatagtaagcaatttagagatatggtacgtgttgccactcatcgaattggtaaaaatgcggagtttgttaactctttgaatgttttcccagttcctgatggtgatactggtactaatatgaacttaaccattgaaagtggtgctaaggctgtttcggaaaatccaagtactagtgttagtgatttaactgaaagcttggctaaaggtatgctaatgggtgcccgtggtaacagtggggttatcacttcacaattattccgtggcttttacaaggctacccaagggatgaagaccttaactgcacaggaattagcaaatgctttttcaaatggtgttgctactgcttataaggctgtaatgaagccagttgaaggtactattcttactgtagctcgtgttgctgcacaagccggtgctactaaggccaatgacaccgacgatgtaactgaagtaatgaaagctgtagttgaaggtgctaagaaggctcttaagtcaactccagatttattgcctgttttgaagcaagttggtgtagttgactcaggtggtcaaggccttttgtttatctatgaaggctttttggaaggcttaatgggtgaaaactttgcagatcaatatcaacctgacgaaaatgaaatggatgaaatgatcaatgcaatgcaccaccaatcttcagttcaaagccaattggctactcaagatattaaaaatggttactgtactgaaatcatggttgatcttgatgccgatgtgccaaataaaaagaagtttgatttggaagaatttagaaagcacttgtctggcttgggcgattcattattagctgtttctgatggtgaaattgctaaggttcacgttcatactgaacaccctggtgatgttttccaatacggtagtcagtttggtcaattaggcaagatcaagattgataacatgagaatccaacacgaaagcatcgttgaccaagatgaagaacaacaagaagcagttgattttgcagtgatcgcagttgcttcaggtaacggtattcgtaagttatttgaaagcgaaggggtaaaccgtattatctcgggtgggcaaacgatgaacccatcaactcaagactttattgatgcaatcaagaagtctggtgcgaagaaagctattgtcttgccaaacaacggtaatattgttatggctgctaagcaggctgctgaagttagtgatattccggttggtattgtaccaactaagactatttctcagggtttaaccgcgatgctttcattcaatccagatgcatctgttgatgaaaatgtggaagctatgacagaggacttagatacggttgtttcaggtgaagttactcaagctacccgtgatactgaaatcgatgaagtagaaattcataagaatgactacttgggaattgttgatggcaagattaaggttgacaatgctgatttaattaagactactgttgatatgattgaaaagatgctggatgaagattcagaaattatcacaattatgtttggccgtgatgctagtgaagagcaagcacaagaagtagttgaacaacttgaagccaaacatgatgatcttgaatttgaaattcatgatggtggtcaacctgtatatcacttcttagtatcagttgaataacaatgattgataatgcattatttgctcctgtcacagacttaaagggtgtagggacaaagactacagctgcattaggaagcttaggcatctatagtatttatgatttgcttttttactttccttttcgttatgacgaattacaaacattaccgttagatcaaatcatggatggtcaaaaagtaatgctaaagggaatagtagccactgaagcgtttgttagtcgttttggctataagaaaacgcgcttaagtttcaagatgagaattgaccatgatgtgatcatggtcaatttttttaatcagccgtggttaaaaaataaaattgagatcggacaagaagtagctatttatggtaaatacaatgttgcccggcaaagtttaacggcctttaaattcgtagcagccaaagaaaatgatagtggtatggcgccgatttatccggttaatcgacatgttaagcaaaaaaaattagtagatctaattaatgtggctattgacgattttattgatcaagtgcaggatattgttccggaaaagttgcggcaagaatatcgtcttttaaaagaccaagtaattattgaaaaaatgcaccaccctaagaatagtcatgaggctgaactagctaagagaagtgcaatttttcgtgagttttttatttttgaattacaattagctttattgacccgtaatgatggtaaacaaatgggttatgcaaagaaatacgatctgacagaaattgctcaattaactaaatctctgccatttgaattatcagatgatcaaaagcatgtggttaatgaaatctttgctgatatgcattctgatggtcaaatgcggcgacttttgcagggtgatgttggttctggaaaaactgttgtagccgtttatgcgatttttgcagccattacagctggctatcaggcggctttgatggtgccaacagaaattctggcaactcagcatttcaaaaaaatcgatgaattgttgcgtcctttaggtgtgcgagtagctcttttaacaggcaatacaaaaacactggagcggcgtgagatctaccgtgaattaactgatggcacgattaatgtggtaattggcactcatgctttaattcaagatagtgttatctttaaaaaattaggtctagtcattattgatgagcagcaccgttttggtgtaggacaacgacaagctttgattaataaaggcgatcaaccagatattttggcaatgaccgctacgccaatcccgcggacgctggctttgacagtttatggtgatatgacagtctctgaaatacatcatttaccagccggaagaaagccaattatttccacatggaaaacaagtagtcaaatgaaggaagtctatcgacaaatgcaagagcagctaaatcaaggctttcagatttacgctgtgacaccattgattaccgagtcagagacgttagacttaaaaaatgcagaagaattgcatgaaaaattaagccatgattttcctaatcacaaggtagtcctgcttcatggtcaaatgccaggtgcgcaaaaagatgagattatgactgcatttgcagctggtgagatcgatattttagtaactaccagtgtgattgaagttggagttgatgtggctaatgccaatatgatggtgatttataatgctgatcgttttggcttaagtcaattgcaccaactgcgtggtcgaattggtcgaggacaaacacaaagttattgtgtctttctagctgatcctaagaccgattcaggtaaagcaagaatgaaaattattgcgtcgaccaatgacggcttcaaattagctgaagaagatttaaagatgcgcggtgaaggtgatttgtttggtaaggctcagtcaggattgccagaatttcgtgtgggtgatgtagtaaataactacgatacattggtcgttgcgcaaaaagaagcacgagctttggttgcggctgatcctgatttatcagatccaggacataaggcacttaagcaagtgctagaatataagcaattagagcaaaacagaatttagaaaagattgtggtgaatatatgagaacaattgcaattgatgcgatgggtggcgaaaatgccccagatgcaatcgttaaggcggttttacaagctaaaactggaatgcctgagactaaatttttattatttggtgataaagaagcattaagaaaactaatccctgaagatcaaattaatgatcaattaggagttgtacctacaacagaagttattgctgatgaagatgaaccagttaaggcaatcagaaaaaagaaagactcttcaatggttgtggcagctaacttcgttaaggaaggaaaagctgatgcgttgctttccttaggcaatactggtgcattgcttgcttgtggaatttttattattggtcgaatcaaggggattgttcgtccaggtttgatgcctactttacctgttcaaaatagtgacgatggcttcaatatggttgatgttggtgctaatgctaagagtaagccagaatatcttttacaatgggccgaaatggcttcgtactatgctgagaagattcgcggcattaaaaatccgcgagtaatgctcttaaataatggagctgaaagcgacaagggtgatgatgttcaccaaaaggcctatgaattgcttaaagaaagtaatttgaatttcttaggtaatattgaaggtaatgaattgctattaggcaaggcagatgtggtagtaaccgatggctttaccggaaacgctgtacttaagaacattgaaggaacctctagcgtcttgcttcatttattaaaagatagtttattaaatggcggtgtaatgactaagttaggtgccttaatggtgaagggctcgttatcgagcttaaaatctaaatttgatacggctaaatatggcggtgcagttttactaggcgttaatgcaccggtagttaaaacccacggtagatcaaatgaacgtccaatttatttcactcttaagcaagtagataaaatggttaaagaaaaacttgttgcagattttagagacgaattcgctgaaaaatagtacaatgttttattaaaaaggagaagttttatgtcagaagaagaaatttttaataaaattaaagacatgatcgctgataattttgatgttgataaggataagatcactgaagacactaattttatgaacgatttggatgctgattcaattgatttggttgaatttatcttgcagctagaagatgaatttggcgcagaaattcctgatgatgaagctgaaaaaattaaaacaattggtgatgctgtttcatatattaagtctcatcaaggataattttctaaaaaaagccgtgtcgtgatttgcatacgaccggctttgtgtttataattagaaaataaatagaaaagattaaatgcttttaataaaaaagctcgagatggaggaatgacctttggagaagcagagtgatcttttattagatattcaacacctgcatacggcataccgtttgcaagggaaattctatgatgcggcagacgatgttaatctgactctgaagcgcgacgagattttagccatcgttggtgaatctggttgtggtaagagtacaattgcctcaagtatcattggattgtacgaccataaaaatactaaagtaacaggggacattctttacaatgaattaaacctagttggcttgaatgaatcacttttcaataagattcgtggggacaagatcggaatgatcttccaggacccgttagccagcttgaacccattgatgcgtgttggtgaccaagttgctgaaactctttattaccacactgatatggacgaaaaggcacgtcacgcacgtgtcattgaattgtttaatcaagtaggaatgccaaagcctgaagaaatgtacgaaatgtacccacatgagttgtctggtgggcttcgtcagcgtgttgtaattgcgatggcgattgcatgtaagcctgaagttattattgccgatgaaccaacaacagctttggatgttactattcaagctcaaattttggatttgcttgaagatattcaaaaacaatctcactcagggattattttgatcactcacgacttaggtgttgtagcagaaactgctgatgaagttgcagtcatgtatgctggtcaaattgttgaaaaatctgatgtaaagacaatttttgaaaacccacttcatccatatactcgatcattacttaactcaatgcctcaatcagacgatacggatgaagatcttcatgtaattcacggtactgtgccatctttgaagaatatgccacgtactggtgatagatttgctgcaagaattccttggattcctgctagcgcacatgaagaagaacctaaggtgcatgaagttgcgccaggtcactgggtaagatgtacttgctggaagtcattccactttaaaaatgaaaagacggcaagtggggagtagtttatggcaaaagaaattattcaaatcaaagatttaaaggtctattacccaattcgctccggtttttggaacagaattactgattatgttcgtgccgttgatggagttaatttttcaattaatgaaggagaaacttacggtttaattggtgaatcgggttctggtaaatctactactggtaaagcaattgttggggttgaaaaagttactggcggccaaatcatgtataaaggtttggacgtaaccaaagcaagtaaccgcaagaagcttgattacaacaaggatgttcagatgatcttccaggattcaatgtcaagtttgaacccaagaaagagaatcgaagacattattgctgagccaattagaaactttgaaaatttaactacagatcaagaacgtgatcgtgttcaagaattgttggatatcgtagggatgccaagtgatgcaatttataagtatccccacgaattctctggtggccaacgtcaaagaattggtgtcgcacgtgcggttgcaacgaatccaaagttaattgtagctgatgaaccaactagtgcgttggacttgtcagttcaagctcaggttttgaactttatgaagcacatccaacaacaatataatattgcttacttattcatttcccatgacttaggtgtggttaagcatatgtcagaaaacttagcgattatgcaccgtgggcgtttggttgaaataggtactcgtgatgaaatctataagcatccgatgcatatttacacgaaacgtttgctttctgcaattcctcaagttgatgttgaacatcgtgaagaacacaagaaacatcgcgaacaagttgaaaaagaatttgaagaaaatcaaagtaaatggtacgacaaggatggtcgtgtatatccattacaacaagtagcacctaagcactgggtagctttgccaaaagatatggcccacgaagctaaacttgaagaattagaagaaaaggagagtgattaagcatgtggaaaacgattttacggcgtttgttaatcatgatccctcaattgattatcttgagtttgctggtcttccttttggctaaaatgatgcctggtgacccattcagtggatcaattaaccctaacaccgaccctaaacaaattgaagccttaaaacgggctgcaggtctgtttgatccatggtacgtgcaatactttagatgggtgggcaacttgttccatggtgatcttggtacaagttacatccagcacgttcctgtaacttcattgattgccgaccgtgcaaataacaccttctggttatcacttttaactactattttgacttatagtattgctatccctcttggtattacttcaggtcgtcaccaagacgaatggcaagatactagtgttagaatttttaactacatcaccttggctaccccaggattcgtattctacatcttaggtttgtggctcttcggtttcaccttgggttggttcccaatttctggttctgtttcagctagtgcctctggtttctggggcgtacttggcagtagaatctatcacatgattttgccagcaattctgtatgccttgattactactactggtactgttcagtacttaagaactgggattgttgataacaaggttgaagactacgtaagaaccgctcgtagtaagggtgtgcctgaaaatgtcgtcttcaacaagcacattttacgtaactcattattgccaatcgctgccttccttggtaacactattaccggtttgcttagtggttcaatgatcattgaaagtgtctttagttaccctggtatgggtaagttgttccttgactcaattggtcaacgtgactacactactttgactgctttgattttgatctttggtatcttgactctaattggtaacttattgtcagatatcatcatgagtatcattgacccacgtattagaattcaatagggaggagagaaaaaatggctgataagaaagaaaaagctactaaagaagacgcaaagcaaaaggctactctcccaccttctggattcaaggtggctatgcacgaaattgtgcgttcaaagtctgctttaacagctttgattatcattattgtaattttactgttcacttttggtggttcattattcttaaaccgtgctcaagtaactgaaatgaacattgccgattcatattatggttggggtgaagcaggccacctgttaggtactgatgatggtggtcgtgacattctgaagctgctcatcatgggtggacgtaactcaatcatgattggtatttcagttactgtaattactgaaattgttggtttggtagttggtttggtttcaggttactttggtggagcaattgactcagttatcatgagaatagttgactttatccagattttgccacaaatgccaattattattgttttgactactgttattcctaactacaatgccgtaactttggtattcttgattgcgatgtttggttggacggtcacggcacgttacttccgttcgttcgtcctatcgcagcgtggtcgtgactatgttttggcatctaagacttcaggttcatctaactttaagattatgttccgtgaagttttgccaaacattacttcaacgattatcattgacgttgttttgagtattgctggtaacattggtattgaaactagtttgtcattcttgaactatggtttaccaagtactacgccatcacttggtactttgattggttttgccaatgacccagttaacgttattaaccgtccatggttgtggttgcctgctactatcttgcttttggtaatttccttaagtattaactatgttggtcaagctctgcaacgtgctggtgacgcaagacagcgtgaaaactaataaagtaataattaaattaaaacagctctatcgcttagtagagctgttttttgtttatataactaaaatcttatttaaagtaaataaaataaatattaaaaattatttcataaaactattgtatttctaatttatggtggtattatttaatcatcaacttgattcaaataactattgaaaaagaattgtatcctagatgggggaaacaagtatgaaattatcaagagtattgggttcagtaggagtcgtttctgcggcagcgttagctttagttgcttgtggtaagagtagcaataacaatgctggcgcaaaggatgccaagaagtttaaggaaactactccagttaaggcagtcaaaaagggcggcactttatcatatgctgaagaaactgatacaccttttacaggtatttttaacaatgaattatcaacttctgctattgacacagatgtagcacagtttggtaatgaatcattatttgatactgatgacagttacaagattaatagcaagggacctgcaacttttaagttggaccgtaaaactaagactatcactattgaagttaaaaaaggtgttaagtggtcagatggtaagcaggttactgcaaaagatgtagagtatgaatatgaagttatggctaacaagggcacaaagtctcaacgttatactgcttcacttcaaaacattgttggtgtaactgaatatcatgatggcaaagctaagactatttcaggtattgatatgccagatggagcaaatggacgtaaagttgtaattcacttcaaagaaatgaaaccaggtatgcttcaatcaggtaacggttacttccttgaaactgcaagtccataccatcaattaaagaggattccatttaataaactggaatcttctgatgctgttcgtaagaatccattgttctttggcccttacaagattagcaagattgttcgtggtcatgggtacctaacaaatactactggagaggtaagccaaatcttgataaaattactgtttcagtaattaattcaaattctgcttctcaagcaattaagagtcataagtttgatattgcacaagttgttaactcacaatggcaacaagttaagaatactaagaaagtcaactttgtagctaaggttccacttcaatatggttacatgggctttaaggttggtaaatgggaaaatggcaagaacgtcatgaatcctaaggccaagatgaacaataagtcacttcgtcaagctatggcttacgctatgaacatcgatgctgttactaagcgttacactcaaggtctgagcttcagaattccaactttaatcccagaacaatttgggcaatactttgataagaatgttaagggctactcatacaaccttaagaaggcaaaccaattgcttgataaggctggttataagaagaaaggtacttacagagtacaaccaaatggtaagcctttaactattcaccttgcagctatgactggtagttcaactcaagaaccaatcattagaaattacatccaacaatggaagaagattggcttgaacgttaagttgactggtggtcgtttgatcgaattcaactcattctacgataaggttcagaatgattctaaagatgttgatgtatttatggcagcatggtcactttcaagtgaaccatcaccaaatgacctttacaacgagaaggctccattcaactttactcgttttgtaaccaagaagaatagtcaacttcttgaagaaatggactcacaaaaagcatttaatactaaatatagagttgataaattccatgagtggcaaaagacatgaatgatgaagcttatgttgttccaactacaaatgcatacagcatccaagcagttaacagtaagattacaggcttctcacttaagccatcagatgccaactcattatggtacaaggttggttacgctaagtaattcattgatcattagtaaaattaaaactccaaaattctaaacataaacaaattccttattattaaattctaataactaacttaatagaaaagacaggtatcttaatccgagtacctgtctttttcatgctattgttatatttttataagagtgataaactgaataagtcaacttgcttcaagtaatggaggaattttactaatgaaaaaggcaaaactttttgctggtattacactgttatcaggtgtagctcttaccttagctgcctgtggtaagtcagaatctcattctgatgaatcaaagactgcttctaagtttaaggaagctgttcctactaaggctactaagaatggcggtactgttaaggttgctgttgaagctgataccccatttactggtatcttcaacgacgaactttcaacttcagctactgatactgaagttatgcaatatggtgcagaatcactttttggtactgatgatcactatgttttcaatgataaaggtgctgcaacaattaaggttgaccaaaaagctaagaccgtaactgttgaaattaagaagggtgttaagtggtcagatggcaagcaagtaactgccaaggactatgaatacgcttatgaaattattgctaacaaagacactaagtcacaacgttacacttcaagtttagctgatttggaaggcttgcaagaatatcatgaaggtaagtcaaagactatctcaggctttgaaatgccagatggtgaaaacggccgtaaagcagttcttcactttaagacgatgaaacctggtatgaacacttcaggtaatggttacatttgggaagctgctgctccttaccactacttgaaagatgttaaattcaaggatttaatgtcaagtgataagatccgtaagaagccattgttctttggtgcttacaagttgcaaaaggttgttcgtggtcaatcagtaacttgggtcctaacgaatactactacaagggtaagccaaagctttcaaagattactgctacagtaattaaccctaactcagttgctcaaagtattaagtccagaaaatttgacgttactcaagtaatcaactcacaatggaagaacatcaaggatactaagggcgttaactttatcgctaaaattccactacaatactcatacttaggctttaaggttggtaagtgggatgccaagaagggcgaaaacgtaatggacaagaattctaagatgaataacaaggccttacgtcaagctattggttatggtatgaacgttaaccaagtttacaagcgctactcattcggtttatcattcagaattccaactttaattcctaagcaattcggtgattacttcgacaagaacatcaagggttacacttacaatatcaagaagggtaacgaaatcttggacaaggctggctacaagaagaagggtacttaccgtgtacaacctaacggcaagcctttaactattcaccttgcagccatgaccggtagctcaactgccgagccaatcgttcaaaactacatccaacaatggaagaagatgggcttgaacgttaagttaactagtggtcgtttaatcgagttcaactcattctatgacaaggttcaaaacgatgacccatcagtagatatgtttattggtgcatggtcattatcaagtgaaccatcacctaatgacttgtatagcgaaaaggcttcaatgaactactcacgtttcgtaactcatgaaaacaccaagttacttgacgaaatggattcacagaaggccttcaaccacaagtacagagttaaaaaattccatgaatggcaaaagtacatgtttgatgaagcttacgtaattcctatagctaatagttactcaattactgccgttaacaagaagcttactggttactcacttaagccatcggattcaatgggtaatggtttccctaactggtacaatgttgcttacgctaagtaaagcaattatttaaaattacaaaagactgtttctaaattttagaagcggtcttttttctgtgacccgaaaactggtataatttataggtataaaaaggggcatttttatggtaagtacaaagtttttaaaaaaattaaaagacgattataatatcgaatttaacaatgaaaagctattagaagaagcatttacgcattcttcatattcaaatgaacatcccaatgatggaattcgtgattatgaaaaactcgaatttcttggtgatgctgtgctagaattagccgtttcgaattatgtttatcttcattatcctaagttgaatgaaggtgaattaactcgtttgagatctaatattgtccgaactgaaggattttcagaattcgccattgaatgtggttttcaagatgagattcacttgggcaatggtgaagaaaaagctggagcacgacaccgcaaaactttactggaagacgtgtttgaagctttcaatggggcacttttccttgatcaagggatgccagcagttgaacattttttgcatttaacagtttatccattgattgataagggtgaattcgatgattcacgcgactataagacagacttgcaggaagtattgcagcaagatggtcctgtgaatatcgaatacaccgttattagtgaatctcaattaccttcacactttgttgttgaactaaaaattaacggaaaagttgaatcaaaaggtgagggtcacaataagaaagcagctgaacaacaagctgctaagttcgctttacaaaaattagaaaaataaggggatgaaaaagtgccattaacagaattagtgctcgatggttttaaatcattcgctgataagacaactattcattttgatgatggaattaccggaatcgttggtcctaatggttcggggaaaagtaacattactgaagccgtacgttgggtaatgggtgaatccagtgctaagtcactacgtggaacgaatatgaaggatgtcatctttgccggtagtcaatttcgtaagccgctcaataaggcggaagttactttagtttttgataataaaaagcgtgagttggcttttaattcagatcaggtctcaattactagaagaattctgcgatcaggtgacagtgaatttttaattaataatcagcaagtgcggatgcgagatgtgcggacactctttcttgattctggaatttcacctaatagcctagcaattatttctcagggtcgagttgatcagatcttaaattctcgtcctgaacaaagaagagtaatctttgaagaagctgctggtgttttgcattttaaacaacaaaaagaagctgccaaggcgcaaatggagaaaaccaaggataatttaattagaatcaatgacttggttaaagaacttgaaggtcgattggagccgctgcatgagcaaagttcgctggctaaagaatatcaatttcaaaagaagggactagatcagaaattaaaaagtctgttagcttttgaaattgaggatttaaaccggcaaaaagaagaagtccaaaaagcagcagataggaaccgaatcctgttaacaaaactggataatgaagtaaaaggttcgcaaagtgctgtttctgaaaaacgggcagaatatcaaaaaattcaaaatgagcgagagcaaacgcagagtgaattattaaagctaagtgaccaattatcacagatcaatactaacttgcaggtcgcacagcaatcacaacagtttaataattcaactagggtagaaactcaacgtcaagttgaagaattgaaaaatagcttggttaagttaaaggatgaattgtctgaactgcagcggaataaaaagcaacttaagcaggagcaagatgctttacaagagcagcatgatcaattgactggtaaattgcacgatgatccagaagaattgagtaagcgactagaagattgtcgtaacgactatattcaacttttacaagatcaggctacaactaataatcagattgttaatctgaatactgaattaaaacgtagtcaggcagacactacttatcaaaatagtgatgtaagcaagcagctaaccgatgctcggactgaactggaaaagctgagaactgaaggcaagcagctgacagttaagcggcaaaaggaaaaagaaaaatttgcgcaagttaatgatcaaaataatgatttaactaaacagattaatcagattcggcaagccgttaacgcagagcgcagtaaattagagaaagttgaagcgcgacatgaagctttagtaaatattcaaaagcggcatgagggttattactacggtgtacgtaatgttttgaatcatctatctgatttccctggtgtgatcggggctgtgggtgaattgattacatttccagttgagctagaagctgcaatgacgacagctcttggcggtggcgtacaggatttgattactgaaagcagagttagtgctagggatgcaattaatcaattaaagcgtagtcgtagtggacgagctacttttttaccattagatggcttgcgtcaatatactattccacagtcaactatcactactttgcaatcttttagtggctttaagggcgtagcaagtgatttagttgaaagtaaagccgatcaagatattactgctgcgattaattatttgctgggtagtgtgattatcgttgatacgattgatagtgcaatgtcaatttcacgtcgagttaaccgctatcggattgttaccttagatggcgatgtgatttccccaggtggttcgatgactggtggtcaaagaaaccaacgtaataattcaccactgcagacggcaactgaaattaatcagttagagaagcaattacagactttacgacaaaatttggctgaagatcaagaacggttagatgagctagttactcaaggtgaaaaagttgcggctaaattgcaacaactgcgtgatactttgcaggagactaatcaagcgattaatgaagctgctatttctttccaaaatcaagaaaaggaagtaaagcggctaactgatgctaatagtttatataaatctcgagtaaaagaacaacaagatcggattgctgctttaaagaaagaaatcacccaggctaatgatcagcaggaacaattggctaagcaaaatgaagtacaaaagggcaaaatgaatgacttgcaagaaaagattaagaacttcaatagcttaagtcaacgtgtacaagaggaattatcaaagcttgatcctcaaattgcagtttatactaataagttggaaaacttagctagtcaggaaaaagaaaaaaatattcagatcactaataatcagaagcaaactgatagcttagagcagaaattaactgaattaagtcaaaatggtgaattatcagttaaaaagaattctgatttacaaacacaaaaagctgaaattaagcaaaagaatgaaactctgcaaaagaagctgaatgaacttagtgcgcaattaggacaagttgatgcgcagattaatcaacttgaccaagttgccagtcgtaattatgatttacgcaaagatgcagcaattgaacaagaagattactcagtaaagattgcgaagtttaattccgcaattgatcagcgcttgtcaactttgagtgaagagtatgccttaacgtttgaagctgctttagagcaagcagaaggcgaaaatactgaagaaaagcgcaatgaactggctaaaagcgtgaagttgcatcacatgtcaattgaagatattggccaagtaaatcttgattctattcaagaatatgaagatgtgaaaaagcgctatgactttttgaatggtcagcaaaatgacctgttaaaagctcgtgatgaccttgaaaagtcaatgaacgagttagatgaagaagttaagacgcgcttcaagagtacctttaatcaagtagcatctagctttaagagtatttttccagttgtctttggtggcggtaaagctagattggaactcactgagcctaataatttgctagaaactggaattgagattatcgcacagccgcctggcaaaaagcagcaacgtttaagtctgctttctggtggtgaacgcgcgttaaccgcaattactttgttgtttgccatgttgcaggttaatccggtaccattttgtgtacttgatgaagtagaagctgccctggatgatgcaaacgttactcgttttgcgcaatttttgcttaaatacgatatgaaaacccaattcatcgtgatcacgcatagacgagggacgatgcggcaggctgaccaactatatggtgtggttatgcaagaatctggcgtttcgcaagtattgtcggtttcattaaaagaaatgaagaataaaaatgaggtgaaatagttgggtttatttgatcgaataaaaaaatcactctttggtaaaaaagacgaagaggatgaaaacaaaaaagaagaaaaacagactgagcaagaaaatgaagctaagcctgaatcagaagataatgatcaagaatctgaaaaagtagttgatgaagctaaatcgaaaactgaaactactgatgaagaagaacaaacagtagaagcacaagaagactctgaggtagaagctgaatctggtgatgaagaaaaagcagtagatttagattctaaacaacagcctgaagaagttaaagtagaagagactactgagactgaaacagaagaacagctttatgaaaaggggctagaaaagactaacaagggatttggtgcaagacttaacgccttttttgccaagtttagaacagttgatgaagatttcttcgatgatctagaagacttattaattgaatctgacgttggctatgaaactgctgaacaattaactgatgaattgcgtgaagaggctaaattgcaaaatgctaagtcacgtgatgacttgaagcgagtaatcgttgaaaagttggttgacctttatgataaaggcggcaatagcgaagatgagcaattgacgtataatgctgaagctaaacctaacgtttacctatttgttggtgttaatggtgcaggtaaaactactacaatcggtaagttagccaaacgttttaaggatgaaggaaagtcagtaattttagctgcggccgatacctttagagcgggtgccgttgaacagctagttgaatggggaaaacgtgttgacgtacccgtagttactggtaaagaaaaggctgatcctgcttctgttgtttatgatgcaactgaacgggcaatcagggaaaaagctgactatcttttagtcgatactgcgggacgcttacaaaataagaagaatttaatggctgaattggaaaaaattcaaagaacaatcaagaagcttttaccagatcagccaacagaaaccttgcttgtgttagatggttcaaccgggcaaaatgcgcttttgcaagccaaagactttgacaagaccaccaaattaactgggcttgttttaactaagttggacggctcatctaagggtggtgtagttctagctatccgtaacgaaatgaatttgccggttaaattggttggcttaggcgaaagagctgaagacttagctgattttgatgctgcaaattatgcgatcggtcttttccacggcttggtctagtgataaagttagagatgtaaatattgttttataaggagaattttatgaaagaatatagtgcttgtactactatcttagttggtaaaaatgcctcgattgatggcaccactatgattgctcgtaatgatgacacttttcgtccaattaccccacaaaagttcattattgagccagcccgtcatggtgaaaagaaacatattaagtcatggttaaacaagtttgaaatggacttgccagaagatgcgcaacgtgtaccagctgttcctaatgttgactacaagcatcgtggctactacgatgaaagtggaattaaccaagaaaacgttgcaatgtcatgtactgaatcaacttatggtaatgagagaactttagcatttgatccacttgttaaagatggattagatgaagactgcatgcagacttctgttttgccatacattcattcagctcgtgatggtgtacaatatttaggtaagttaattgctaagtacggttcaccagctggtaactcagttttattcagtgataaagatgaaatttggtacatggaaattgttacaggtcaccactgggtagccgagcgcattccagatgattgttacgctgcaactggtaatcgagttgcgattgaacaagttgactttgataatcctgattacttcatgtggagtaaaggtattcaagaatttgttgaagaacaccatttgaacccagatcatgaaggctggaacttccgtcatatttttggtacctatactgaacaagatcgtcactacaacaccaaccgtcaatggtatattcaaaaattgttcaatcccgaaattgaacaaaacccacaagatggcgatattccatttattcgtaaggcagctaagaagatcactaaggaagatattcaatttgctttaggttcacactaccaagataccccgtatgatccatttggtaagggtacggatgaagaaaaacatcgctaccgtccaatcggtttgaaccgtacgcaaaatgctcatattttgcaaattagaagtgatgttccagcagatcgtgcggctattatgtggttatgtatcggtggtccaactttcactccatttgtaccattctttgctaatatgaatgatactgatccttcatataacaatacctcaatggattacaatatgaatgatgcatggtggtattacaagtcatttgcagctatcgttgaaagtcattacccacaatttgttcagcttgatactacttatttaactgaacttaaccgctacttcagaggtcgagttgaagaaattattgctggtgcagaaggtaaatcaggtgatgaattaactgaatatttgactaaggaaaatcaaaagactgttgcccatactcgtaaggaaactgaaaagctttggggtcaaatgatgattgaatcgatcaacatgtccaaacttactttcaatatggatgaaaatctttaataaattcaaaacagctcgaaaaagggctgttttttataatatgtgaaatgaaaggaatatagacaatggcagaaggtactattggctcattttttactaagattaacaatgaagttgaaaaacaaatgaataacgatttaaaaaatttggtattaatgctaatgaattggaaatgcttattgaattaaatcatcatcagcatggcaaaacttttgaaaagttggctaaagaattgcatgtaactaatgacaaggtcaaatctttgacaaaaaaattggctgccaaagatttgtgcaagaaatttgaaaagcaccgtgcagaaactgaccaaactattacagggatgctcagtaaagatgaaactcttggcttggttaatgtactgaaaaagatgcttaagtcgagtgaagacaataagtaatgtaaaatagtagaactccagaagttaattacttttggagtttttttatgcaaaaattattgacaaatctttaatataatattactgtattaagtaaatagaacagtaatattattagtgaaaggataaaaatgtcagaaattttaagagtggatcaagtaactaagacttatggtaaaaaaggtgagaagcaataccaagctttaaaaggaattagctttgccattgaacaaggtgaattcgttggcattatgggtgcttctggttcaggaaagacaactttattgaatatcttgtcgacgttagataagccaactagtggacatgttttagtcaataagcaagacattactgcacttaagaacaatcaaatggcagattttcgcggaaaagaaattggctttatttttcaagatttcaacttgctagataatttgactaatcgcgagaatatagccttgccattatcgcttcaaggagtgaaggcaaaggatattgacggaaaagcaatggcgattgccaaaagattgggaatagaatctatcttggacaaatacccagctgaaatttctggtggtcaaaaacagcgtgttgcttcagctcgagcattggtccataatccggcaattttatatggtgatgaacctacaggagctttagattcacaatcagctacggaattattgaaaacaatggcagacttgaataagaatgatcaagtttcgattctgatggtaacgcatgatccttattcagcttcttacgctcaaagaattttgttcatcaaagatggaaaaatcggcaaagaaattaaaaaagaaaataagaccagagaagaattttatcaagatattattgctgaattaggtagacgttagagggaggtatagacgtgctttggaaattatcactaacagggctaaaaagtcgctttaaagattatgctgttttgttttcggggctaactctagctgctgcaatcttttatatgtttatgaccattgcaattaatccagcttttcttaagggttcaatggccattgccttttcaattacccagatggtctttatttttgggatagcgctattagctattattaccctagtctatattgtttacgcaaatagttttttgcttagtatgcgtaaaaaagattatggtacttatatgatcctaggagcgagaaatagtaaaattggccgtttaatttttacagagacggttgttattggtttactcgctactgcattaggaattttaattggtatcggcttgactcaagttgtttctcagttattaatctctcaactgggtttgcagctgcataaattcttaggcttttatttaccggctattttatggacagttgttttctttgtagttttatttttcttggctgcaatttggaatcggcacaaattggtaagtactagtgtaatcaagcttttgcatgaggatcaaaaaccagttaagttacgtaataaccgaatctggaaagcaactgaagtaattctaggccttgcccttctagccattggctactgggcaatgtgggattaccatcagttgcaaattaaatcggttgaaattggttttgtcactattttggctggttcatattttgtatttgattctgtatttactacagttatcaatgctttacggaaaaataaaaagtttaaatacagtaaactgcattcttttaccttaggtcagctaaaatttaggttaggtgattacaatagagttttaactgttatttccttgctttttgctctagcattaggtgcgatcactgttggattaaactttaataatatgacagagactgctcttcaggcaacatattatgatgctgtgttgtataaaagggatgctaaagttaatcaacaacttaaaaaagttgccgttagaaaacaaacgactttgaattataaggtcaatgggaaaaagaagtttcctgttctatatgttactgaccaagaaattgctaagaaaaaaatcaaattccaatctggtcgaaagaacggcgaccaaatgaattggaagacaaagacgattacagttgcaggtgtaaagaataaaaaacaagagatgaatttccaacttgctagtttaacaccttattctgattatgaggttaaagttgtaactccagctgaatatgtgaagattcctggaaaaaacaaacaagtaaccttgctattaatcaataactttagaagtaattttaataatattgaaaaattgcaaaagatgtcacttgaccagacagttactaaggatgcacaaggagtttatgtttctctgaataattctaaatctgctcaatatcgcttagtagcaagcgttgcgtcaggttttgaatttatgggcttcttcttaggcttagctttcttagctatgttagcttcaaccttaatgtttaaagtgctatcaggagcaaacagtgatcgtcctcgatatgaaatgttgtggaaggtcggatcaagacgtaagttattaaagagctcgattaaagcggagattggtaccttgttcgctttaccggctgtcttgggtgtgattgatgtattatttggactacaatttttcaaagggattttagctaatccatacgataaaatttggattccatttacgatctttttagtattgtatttgctttattacttaattacagtaaaactctatgaaggaattgtattgaaaaaataatggtacgaaaaaagatctgcaaaattgatacattccctgtcaagtagacagtagaattacataaagcttttattcctcagttgattaataatcagctgaggattttttggcttctcttattttcttttcgtgtattttttgccagtatttctcaattcgatgatttggtgcaatagggcaattcttaatattgcctttcatcgcttctttgcgcatttcaccagcagttaaaccgttaaaacgtttctgtggatcttcattaatgtagtaatctattgtcttacaaatagaatcattaagttcatcataactggccacttgaggatgaagaataactcgcatttctttgataatgccttgccagccttccattggaccattatcaatacagcagccaacacgagacattgattgcgtcatgccttggtcttttaattggttttggaaaggtgcgcgagtaaattgaaaaccacgatcactatggaaaagcggatgagcattagggtatgctttaacagcctgcttataggctgcttgaactaaagcagtatcgtttcgtttactaattgcgtagccaacaggatagcgatcatatagatcaaacacagtacatagatatgccttaggcaggttagcagcaacgacttcagtgatatctgtacaccatttttcattaggtctagatgcattaaagtctctttttaacttgttttcggccgttttctcaggcgttgtatgcttgaactttagcttctggtatctaggcttttgtgatctaatgccattgatacacatcaagcggtaaacagttttatgataaaccggcttttcatcagacatctgtcgattaactgccatggtcatcttttccgtcccaaacagactgttgttagacttggttatttcaatgatctttgcttcaatctttttgtctcgttcttcacgcttactcggcttgcgcttaggatcaaagtatttgtaataagctgagcgtgctattttagcccatttgcacattaaatcaatcttccaattgtacttttgatggcagtcatggattaactgatatgtttcttgtttccagcgtctttttattgcggcttgtctgtatcttggttgtccggcaagcacatcctttctaactgatctaatttttttaggaattcgttcttagtttgttcttctttgagctgacgctctaattccttaatttttcgattagccagttctaactcagttagctcttctggcttcttatgtctgcctcgtttatctgttaatcctgtttcaccattagctagatatttgtgtgtccagctgtaaacctgctggtaagaacaatcaaatttgacagctgtttgagtgtaattcttgtcgtgattaagacagtattgaacaatctgaattctttcttgctgggtagtttttcttcttgctttagtcatatagacctccggatggggatcatagtcccgattttctatatgactattatacttggaaacccattctgatactgttccattgcttctaatgccatatttattagctaaagaaggtaacgacattttgccagctaaatattcttgaacaaccttttctttaaatgccttagagtaatgattattgtattgagcattacttagaagggtatcacgattgctttgatattgatgaacccatcttcttacttgcatcgctccacttttacttggcatcttaagccgtttagctatttcaacgctgctcctattaccattcaagtattgttcaactgcccatatcttttgatcgaatgaatatttactttttctggacataaaaaatcccacctccatggataattgaatactttatgtatttcaatcgtccactttagtgggattgtatcaaatgcagatctttttaactgtatttagattaattttatttattttgcttatttaaaattgaatgacgaacaccatagctaaagtaaatgattaagcctaaaataaaccaaataccagcataaaatttagcttggtagtcaagccctaagaagacaattaaagcagccatgaaacctaaagcaggtaaaactggataaaatggcatcttgaatgaaggatcatcaatgtcttttccttcacgtggacgcaacttataaatacctaaagaaacaaacataaaagcaattaaagtaccagctgaaaccaattgtgacaacatggagaaggggaaaaatgctccaagtaaaattgctacgattgttaatgtccataaagcattattaggtcgacgatctgcattcaacttgcccagccatttaggaagcatcccgtcacggccaaatgaatagatcaatcttgaaccggccatactcatcccaatcaaagcagtgaacatccctaaaacagcaatggtttggacaatgatggcaacaattggatgaccagcaaaccgtaaggctaaacccactggttcagcggaattagcatacttctgataaggcataattccaattaaaactaaactaactccgacaaataaagtaacagcaatagcaagtgagcctaaaatgctgcgaggcatagttttttgtggattaattgcctcagctgagttagcggcgattgaatcaaagccaatgtaagataagaaaatcattgaaacaccagcatagattccttgccagccaccgaatggaccgttagcagtcatcttgtatttcggtataaatggggtgaagttaacttttttaattgcaaaaacgccaacggcaataaagagtagaatggctaacacctttaatacaactaaggcattttcaacgcgagctgcccttgaaacaccatgaccaattaataaggcaactaacaagattgaaactaaagaaatgatatcaataataccaccgttattgccaaaggcgttagataatgacgcgggtagtttccaacctaatggtgcgattagagctctaaagttagcagaaagccccgaaccgacgaaagccaaagcaatgaaatattctgctagaagggcccatcctgctacccaaccccagaattctcctaaaactacgttgatccatgaataagctgatcctgcaaatggcattgcagcagccatttctgcataggcaaaagccactaaaccagcagcgattgctgctaaaataaaggaaatcgctactgcagggccggtatgcttagctgcaacttcaccaggtagagtgaaaattgaagcggagacgattgttccaacacctagagctaagaagtcctttacttttaatgagcgcaccaggtgtccatctttattttcatagacgcgtggatcttctttactgttcattctctgccaaagattcacaacgcaacttcctccttatgttaaaatatattcatctaattataattaaaaatacgtaaaaaaacaactattacatatttgaaattccactttttttagaaattgttatctaagataggttaatctagcactagcttatgacctttgttatactaaagactggtgaaaatcaatggatgaactaactaaaaacgaggagctaggcgatttatatgcctactatggctctttattaacccaggggcaacaatcttattttgaagactattactacaatgatttgtctctaggcgaaatcgctgctaatcatcaagtatctcgtcaggctgtctatgataatctcaagcgctcaagtaaaattcttcagaactatgaagagaaattgcatatgaagcgcgacaacaatcaggttgaagatgttttggcagatacgcttttatctttagataatggtgatagtgaagctgctaaaaaagaaataaccaatttattaaatcaattgaggggagaatagcccatggcttttgaaaatttaagtgaaagaattcaaaaagcattaaaaaatttaactggcaaaggtaaggtctcagaagaagatattaataaggctagtcgtgaaattcgacttgctttgttagaagccgacgttaactttaaggtcgttaaggactttattaaaaccattaagaaagaagcccttggcaaggaagttcaggaaagtttaaacccaggtcaacaagtaattaagatcgttaatgaacagttaaccaagatgatgggtgaagaagcagttcctttaaacaagtctaagcatattccaactatcattatgatggttggtttgcagggtactggtaagactacgactgtgggtaaattagcctatcatttgcaaaagaccgaaaaggcccgtccgctgttgatagctggcgatatttatcgtccggctgctgttgatcaattgaaacaaattggtgatcagttaaaagttccagtatatagtgaagacggagaaaaagacgtagctaaaattgttcaagatggacttgcagaggctgaaaagaacaagaatgactatgttttgatcgatacagctggtcgtttagaaatcgatgaacctttaatggaagaattagagcgggtaaagaaagtagcccatcctgataacattcttttagtcgttgatgccatgactggtcaggcggcaacagatgtagccaaaggctttgacgaacgccttgatattacgggcgtgattttgactaagttagatggtgatactcgtggtggtgcagctctttcaattcgtgcggtaactggtaagccgatcttatttactggtcaaggtgaaaaattaagcgatttagatgttttccatccagatagaatggcatccagaattttaggtatgggtgacatgctttccttaattgaaaaagcccaacaagattatgatgctaaggaagctgaaaaagtcgctgaaaagatgcgggaaaatacttttgacttcaatgattttgttgatcaattgcaacaagttcaaaaaatggggcctcttgaccaaatcatgaagatgattccgggactagctaataatccgcaattaaagaatctaaatgttgatcaaaagcaaattgatcatactgaagcaattgtttattcaatgactcctgaggaacgagaaaatcctgatatgcttaatccaagccgtcgcagaagaatagctgctggttcaggtcgtcctgtagttgaagtcaataggatgattaagcagtttaagcaaatgcgcgacatgatgagtaaaatgtctaaaggaaatatgaagggcttgagcaatttgcctggaatggattcgccaatggctaagatggcaatgcgccgaatgaataagaatttcaagaaaaataagaagaagcgtttacgcaaggtaaaaagattccattcttaaaaaataaactgttaaggaaaaatactttacacctgttaagtttggtggtatattattaattgttaagttttaggaggaaattaatttatgtcagttaaaattcgtatgcaccgtgctggtgccaagagaaagccattttacagaatcgttgttgcagactcacgtatgccacgtgatggtcgcttcatcgaacaagttggttactacaatccagtttcacaaccaaaggaattgaagcttgacgaagacaagatctttgaatggttacaaaaaggtgcacaaccttcagacactgttagatcacttctttcaggtgctggcttgatggctaagttgcacgatgcaaaatacaacaagtaattttgctattaattaagagcttgatgccgtgtgcttcaagctttttttatacctaaaggagaaaaaatggaatattacgatgttgctcggattttaactatgcacggtttgaatggtgaagttaaagttagtgtaattactgatttccctgaagatcgttttgctatagggatgcatttggcaatcaaaggtgaaacttctcaagttttaactgtggccaagagtagaccttttaagcaattttggttagttcaatttgcagagattactgatattgatcaagctgaaaaattaaaaggaaaaatactagttgttagtgaagccgaccgcggtgaactacctgaaggcgtttattactataaggacatctttgactgtgatgtcattgatgaagaatccggtaagcgcttgggtaaaatcactgatattgaatcgcctggtgctaatgatatttggctagtccatgaagataatggtaaagagtattggattcctaatattgcatcggtggttaaaaaagtagatgtagctaataaaaaagtctatgttgagttattggagggcttacgcgatgaagattaatgtattgacactttttcctgatatgtttgctcctttgcaagtttcaatgttgggacgtgggcttgaagataaaaaatgggagcttaatttagttaattttcgtaatttcactaccgatgtacatcatcatgttgatgatacgccctatggtggtggcgctgggatggttttgcaaattatgccgattaaaaaagcacttgactcgttaccatccacaggtaaggtaattattactgcaccacaaggtaaaacttttaatgaaaaaatggcgcaaagctgggcccaagaagatgaattaacctttatttgcggacattacgagggctttgatcagcgggtttatgacttggctgacgaaactgtttcaatcggtgattatgttttaactggtggtgaattgccaacaatgagtatgattgatgctacagtaagacttttacctggtattttgggcaatgcagctagtccagttgaagaaagcttttcacatgggttgttagaatatccgcaatatacgcgtccagcagattttgaagggcaaaaggtgccagagatattgactagtggcaatcatcaaaaaattgcacaatggcggcataaagaggctcttagaacaacatatttgcatcgacctgatttgctcaaagaacgagttttaacaactgaagaaaagaaaatgttggcagatattaaagcagagcttgattaagcaagctctacttgatatactattcatcgtggcgtgaccacaatgaataagtttaggggtgttccgctggcgttggtacgttgatgaatgccgaagaaggagaaaagtatattatggatccattaattcaagaattaactaaagaacaacttcgtgacgatattcctgcattccgtgcaggtgacactgttactgttcatgtacgtgttgttgaaggtactcacgaacgtattcagttgttcgaaggcgttgtaatcaagaagaagggtactggcatcggtgctacttacacagttcgtaagattgcttcaggtgttggtgttgaaagaaccttcccagttaacgacccacgtgttgctaaggttgaagttaagcgtcatggtcgtgtacgtcgtgctaagctttactacttacgtgaacgtcacggcaagtcagcaagaattgctgaagcacgtcgttaatcataacgtcaatcataaaaaggtcagttccagtggaactggctttttttctacccaaaagttgtatataaaatgctatgatggagttatggaatgaatgaggtgaaataaatgaagttcaattgcaaatttgcacttgtggcagcaaccgtattgacagtagcacttatattatcttttcccaatatcacgactacggtacaagcaacgacgaagaaagcccaagcagctaagaatacaatccgggtaaataaagcaccaataatttatgatcgtgcaggtaattataattcgaaatatcatcaaaatatcaaagctggtactcgtttaaaatatagtggcaagacttatattattcagcagcgctttgcagctgggattcctgtgccaactagtcgaattattggtggtaagctttactattcgattggtaaaggaggctatgttaaagaaagcgatgtgttaacctggcttggtaacacaaatacggtcaagttacattttcggcacaagaaaaattatatttatgataaaaatggtaaaaaattagttagctataatggtggcaagaattattttactaataaacaaaaacccaaaattgaggtaccatactataattcgcctaagcaattatttaatattggtaagggtggttatattgatgccagccaagtaactactttgaatggcaagggaaccgtgtttttaaataataatgcacctatttatgatgcaacaggcaagcaagtcaagaataaaaatctaaaacaaggcacggttttaaactattatggtaaacctaagaaagcggctgctaatactcaattttattattatcaaaataaaactaagatgactttacctgcaattcaacaaggtgatcatacttattttcagattagtaaaacacaatatatcaatgcggcagacgttgctttagtagatggtaagacgttgtgggataaaggacctgtgagtgtgtctttaataaatgatgcatatgcgtatactgccaaatttaagcaaaataaaaaggtgctttatcgtgctggcgctaaactaacggttgatagaatcaaaatagaaggtaaaaaatcacctcaactttatttacatgttaaaggtaccaaaaactatctttattggagtaatgaaaaagactatggcgcatcaccattagattatcgtcacggttcaactaatttaatattgcagacactgttgcataattagtctgtgtgtaatacttttaaactgatatcataaaggactattatcttaatagaaggtgatagccttttattttaaaaagatcacaatgataaaatggctgtatagtagtaatgatgaaaaaagattgtgaagaaattcaactgtgaaactgctgtgaaactaagataaaaatcacaaaactggcagatatctattactaatcttgatataaaggcatttgttattgtgaagctatttttgtaaaaaataatattaaatgtggaattagcgttagaatcaatagttatccacatttgtaaatgtccccagtaaagtcgagtaaaacaaaaatttaaaagaagatggaaaaatggattatccgaaaaaactgattgacgaagtgaaagaacgatctaaaggcatgcagctagaaggaattaattctgtctcgggtccccaacatcctttattaatgattgtcggtgaagctcctggtcgaaatgaaattgttaataatattccctttagcggggatgcgggtaaggaattggataaatcattgaagcagattggtctgacacgtgatcaggtatatattacatctgctgtgagaagtcgaccttttgcaatcaaaaaggtttttagcaagcgtgaaaataaagaagtaatcaaatatcccaatcgtaagccaaccaaaaaagagattctagctcatgcgcctttcttagattttgaaattgaatatgctcaaccaaaactaattgttgccttgggtaatacgggattagaacgtcttttggggtctggtcataagatttcagctgaacatggtcaagtaattaaaaatacaccaattttacgtttaaatgaaactaaagacggctatatttggtcaaaagaaagatacactattttcccagaatatcatcctgccgctgttttttataatcgcaagctaacagatgatattattaaagattgggataaaatcaagccgtatgtagaaaaggaaaaatctgaaaatgagtaatgaaacttttttgattccaattagacaaaataatgatttatcggatatcgctttaaatgaattacgcatggatctagatgagcatgctttacatcaacgttattacactgatattgcttatttagcaggaaatagtcgtaagtatagtctaaatagtgtacaaaccgttgcgagtcctttgataggtaagaaaattttatttttgggttcttccgttacttttggttttggcgctttgggtgaaagctttgttgattatctttggaagcgtgatggcgttgctgcaattaaagatgcagaaaatggtacgaccttagttgatgaagatacttataagacaaacgattcttatgttgctcgttttagagaagagttgaccgaatcacaacctgatgtttttgtcttacaactttcaactaatgatgcaaatcaaaataaaaaactaggcaaaattactaatcaaaactttgataccaaaaccattacgggagctttggaatatatgatttcaacggctcaagcaaggtggaaatgtccaattttaatttatactaatccttattttgctaacccgttatacaaacagatggttgaacgagtacacgaactggctcaaaagtgtcagctacgacaagtttaaaaattgatatgtaaatatgttacttttatattataaagtatgatataatttcatcacaaggtggtgagattttttgtctagaattatgtatttaaaagaagctgctgcttatcttggtaaagctccattcactcttcaaagttgggaccgggctggtaaattaaaagcacatagaactgctaacaaccggcgcttttactatcaatcagaacttgatcaatatttaggtcttgatcataatgaacctattgataaacgtaaaattatagcttatgcgagggtttcttctaatgggcaaaaggatgatttaaaagatcaagtcgcttttttaaggcaatttttgaatgctagaggcattattgccgatgggtatatttcagatattggttcagggcttaactataagcgtccaaaatggcttaaattgattaaagacattgataaaaaccaaataaaagaaatttatgttacctatgaagaccgcttcatccgctttggctttgatttctttgaaaagttttgctcttggcatgactgtaaaataattgtcttaaataatgaagatacttcacctgataaagaattagtccaagacttaatcagtgtgattcatgtattctcttgcagactatatggcttaagaagatataaaaataaaatcaaaaatgatcctaacttaaaagaataggcctaagttaaaaatcctaaaggaggtgaaaatgatgactaattattaccttaagacacgtgtgtatgagttatttccaagtaaaacaatgaaagcagtgcttgaccgcaactgtgattatcgcagatattgttggaatcaagctttagctttatggaatgatctatattttgctcatcaaatctacgataagattcgttatactacttttacgcctaaagaaaataaaaaaacacaccaaatcaaaattattaaaaaagatgttcacttaaatccaagtccaagctggcgcttggtacgtgataagttagttgaagataaggaagattggcagttcaactattcggctcatttgcttcaattagcagtccaagatttaggcaaagcatggaataacttttttgataaggctcaacctgattggggcaagccgaggtttaaatctaaacgtgaagtaagacagggctttaaaagcgatcaagctaaggtgattaatggagagctagtcttggaaaagcccaaaggcttaaagcaagaatgggaagcaattggcttatctgaaaaaccgttagattatccaactggtgtcatgagtatttatcgtgaaagtggacgctattttgtgtctattccatataagatacctaaaaatgaatttaaagctaaagcaagtacaggtagagttactggtgttgaccttaatgtgggacactttaactacatagctggtgatgaacgaatcttacctcaaaagcttgaatatacttatgagaagattaagcactaccaaagattattagctagaaaacgtaaagtaaacggacgaaaagaaagcactaaaagtaataattacttgaagacgagaaccaagcttcaagtagcttacaagcgtgctactaacattcaaaacgatttactgcaaaagttcactgcaaagctaactaatgattatgacgccatagttgttgagaatttagatgttaaaaagatgatgatgagccatgtagcttcaaagggtatgcacaggtcaatgtttggcaagtttagacaaatcatagcttataagtgcaaatggtacggcagagagctaattatagccaatagtttgtatccatctactcaaagatgtgctgtttgtggaactgttaaaaaaggtgaagataaaatcactttaaaaggcaacaagaagcatggtactaagcataatgagtttatctgttacaattcaaaatgccctaactataaccaaaaagttgaccgtgacgaaaatgccatgctcaacttaacaatgctagttgagcatccagaattaaataaagcattataaaagaaattgcgggcgaggctacgtccgataaagaagccaaaagagtcagtcaatgcgattactcctaaattggaatatcggaaaactgatgaagacgttggtaagaaaaatgcaaggcactatagaccataatgtatgtaaatcaaacacactgcatacattagcatacatttttcatagcacgttgagattctagatttatacgatcatcctgattttcagcatcaagacgctttgtatatggctgatgaaattcatccaactcgtgcgggttatctaaagaaatggttaccattatttgaagaaaaaataactgaaattttggcataaagaaagacctagataaattatctaggtcaaaattgaaattagtcaatgttattacgatacaagctaactaccttacccaaaattgtaactttaggtaaaatgattggagccattgtatcattttctggctgtaatcggtagtgatccttttctttgtagaaacgcttaactgtagcttcattttcttcagtcattgccaccacgatttcaccattgttggcagatgattgtttgcgtacgattacgctatcaccgtttaaaatgccagcgttaatcatactttcaccgtggactttgagcataaagagttcaccagcatcactttttaagtctggtgggagtggaaagtagtcatcaatatcttcaactgccagaattggttgtcctgcagtaaccacaccgataactggaatttcctttggcttgatacctaactcttttttaccttcacgggtaatttccaaagcacgaggttttgtagcgtcttttactagccagccctttctttcaaggcgagctaaatgaccatggacagtggaagtagaagaaagaccaactgcagaacagatttctctaactgtaggtggaatgctccgtttctcaactgtatcgtaaatatattgcaaaatttctagttgctttttatcgcttgtttttcttggcatttttaattctccgtttgtatttatggtacttaatattataacctaattctaccagataatgtcaatattctcaaacaggcgttcttaagaagttatactttttttatgacataaaatagggtagactaatgagtgttaatgtgaggtggaattattatggataataaagatgcaatgagcaaagaagaagaaaaaaaggtaactgatcgaatcaacgaactttaccataagaaagaaaaggaaggcttaactccagaggaagaagctgaaagaaaagaactacataagaaatttttagctaactttagagctgcctttaagcaagatgttgaaaacatggtcatcttagacaagaatggcaaggaagttacctcagaacgtgccaagcgagcacaaagaagaaaaggacttagaaaagattaattagttctttcaaaaagttagagaactatgataagatataaatgttagttagatggaggatttaatatgaatttaggtttagcaatttttttaattatcattgcgctcttgattggcgctgtagcaggtttttacggtgcaagagcttacatgaagaagtactttaaggaaaatcctcctattagtgaagatatgatcgttgctatgatgtcccaaatgggtcaaaagccttcaaataagaaggtacatcaagtaatgaacatgatgaagcaccaacaaaagtaattaatttaattagttttgttagaaaaggcgaaggatttccttcgtcttttttgtgcacttttaagaatgaggtgaaatatgggaatatttagtaagttagggtggttttttaaggctgagaaaaaacgttatatcataggcattacctttttggcgttaacttctttagctaacttggtaccgccccgtgtattaggcttaatggccgatcaattggatcaaggtcacatctcttggggacaatatggaatgttgatcattgctgtcgtggccgctgcattcacactttatattttgcgctatttttggcgtaaacaaatttggggcggcgcagcagaattagagcgccaaatgcgttcaaagttatttgatcattttatggtgatggatcggactttttatcagcgtcatcgaaccggagatttaatggctcatgctactaatgacgtttctgccattcagaacgttgctggtgatggcgttttaacattggttgattctttagttatgggactttcaacaatgattgccatgatcatttttgttgattggcgtttaactattgtagctttattaccattaccgtttttggcattgggagcttggaaattaggtgatcacttacatgatgcttttgataagtcacaggctgcattctctaagctgaataataaaactcaggaatctgtatctgggattaaggtgctcaaaacttttggtcaagggaaagaagatactgctgcttttgacaagatggtcgatgaaacgatcaatattaataaaaaagtttttgtctgggattccttatttgatccactgggaacaataattatcggtactacgtatgtgatcacgattatttatgggggactattagtaactaacaagattttatcaattggccagttggtttcttttatcgcgtatatttctaacatggtttggccaatgtttgctattggttatttgtttaatattctagagcgtggtagtgcaagttatgaccgtgtagaaaagttacttgatgaaaggcctttgattactgatgcacatgcagatccaaatattacttctcaagatttgcaaggtgaattaaaatatgacattaaatcatttgcatatccagatgagccagatattccagttttaaagcaagtcaatttcactttaaaacctgggcaaactttagggttagttggtcgagttggtgcgggtaaaaccacaattattcaactgcttttgcgagaatttgatcagtatgatggtcaaattactctgaatggaaaagatattagaaatattcaactaaaggtattactcagtcagatctcctacgttcctcaaaataatttcttgttttcaactagtatcggcaaaaatattgctttctcttctgaaaatgtagataaggatgatattgcagctgcagccaagaagagtgatttgcatgatgatgttttgcaaatgcctaaaggctatgaaactttagttggcgaaaatggcttatctctttctggtggtcaaagacagagaatgtcaattgctcgggcattgctaaaagatagtcagattttgattttagatgatgcattgtcagcagttgacgcaaagaccgaaactgagattttgtcatcattaagaaaagagagagctgataaaactacaatgatcgcggctcaccgtttgacttccgtgatggatgctgatttgattttggttctaaaggatggtcaaatcgttgaacgtggtaatcatcaacaactattagctgcagatggatggtatgcggaaatgtggcgtagacaggaattacaagcgaaagtaggtgaagatacagatgaataataacgaagaacagcatgaatctgtttggtctaaggcgataccatttaaagagcaagttgatatttttaagcgtttaatgggctttgttaagcaatttaaatttgaaatgattgttgctttagttggtgcatttattgttagtgtaattaatattcttttgccacgtggcttgcaatatttcttagatcactttctattgcatcaaagcacaacagtgcaggtgattttgtttgcaggttttctttatgctttaggctcaattttaaaggcaataattcagtttacttaccaatatttctttgctttaggatcagaaaaaacgctagagagtgtcagaagggcattgtaccgcaaactgcataagctagggatgcgctattttgatcaaactcctgcgggctcaattgtttctagagttactaatgatacgatgactttgagtaattttttgacggtgctatcaacttttgtgattggtgctttttcggtgattactgcgttagtagcgatgtttactactaatatagttgctgggtggttgattttactctttattccgattttattattagttgtttggctttattcgcaaaaaagctcacgtctttatcgtaattatcgtgagcgtcttagtcgaattaacgctaacttaaatgaatcaattgaaggagtatcggttatccaagaatttaatcaagaaaaacggatgactaataattttgaaggcgaaaatggtggtttaatgaatacacgcttcaacatgatccgagtaaattcattgttattatcgccattgacatcgctgctttattcgttagctttagccatttcattaatgtactttggttttccattacgtgaaacttttgttccagctggtgtagtctatgccttttcacaatacatttcgcaactttttaatcctatttcaactgtgatggatcaaatgacctttttccaagatgggattgttgcaggaaagcggatttttcggattcttgatgatacccaatatgaaccacagcaggatgctcaaaaaggattgacgattactaaaggaaaaattgagtttaaacatgtaagcttttcttatgatggcaagcatgaaattttacatgatatttctttcgtagttaatccaggtgaaactttaggaattgttggtcatactgggtcagggaagagctcgattattaacgtgatgatgcgtttttacgaattcggtcaaggtgaaatcttgattgatgacgttaatattcgtaaatatcctaaagaagaattaagaaaaaaacttggcttggtattgcaagaaccgtttatgttttatggagatatttcatctaacattcgtttgtataataatcaaattactgataatcagattaaagacgccgctaaggcagtccaagcggatcgctttattgaaagaatgccgggtaagtatcatgctaaagtgattgaaggcggagaagaatttagtcagggacaaagacagttaatttctttcgctcgaactttagtcacagatcctaagattttggttttagatgaggcaacagcaaatgttgataccgagactgaaactttgattcagcaaggactaaagcggctgagaaagggtcgaacgacattagctattgctcaccgtctttctacgattgccgatgcggatcaaattattgttttagacaagggacgcataattgaacggggtacgcatgatcaattgcttgcacaaaagggttattactataatttgtataccttgcaaaataatgaaaataaaaactaattgtttttcaggacgtttgtgtagtagcaacgtctttttttgatataatagttaaaaagtattaaataattatgaatatttataaggagcaaaaatgaaaagatattttacagttcgtggtggagctggcgacgtttctaagccagacttaaatgctaagccacaagataacttatacttggctgttaactcagaatggctatctaaagcagaaattcctgctgataagacatctgctggtgtcaattcagagcttgaccaaaaaatcgaagatcgagtaatgaaagactttgcggacattgcggcgggcaaagaaaagatgcctgagattaaagactttgataaggcagttattttgtataagattgcaaaagattttgctaagagggatgcagaaaaagctaatcctattcaaaaggatttacaaaaattaatatccttaaataattttaatgattttaaacaaaaagctgccgatttgtttatgggaccatatgctttaccgtttgtatttgacgtcgatgccgatatgaagaacactgatgtaaacgtactccattttggtggcccaagcacattcttaccagatactacgacgtatcaaactgctgatgctaagcaacttttggatactcttcaagaccaaagtattaacttactgacaatgtccggtattggtaaaagcgaagcacgagtttatgttgaaagcgctttggcctttgatcaaaaattagctaaggtagttaagtcaactgaggaatggtcagattatgccgcaatttataatccagtaacatatgctgactttattaaaaaatttaaatcatttgacatggctgatttcatggattctattttaccggttaagccagatcgaattatcgttatggaaccacgttttctcaatcatgctgaagaattattgaatgaagggaattttgctgagattaaaggatggatgctagttaaatacattaacagcgtagctaaattattgtcacaagattttcgtgaagctgcgtttccttttggtcaagcagttactggtacgccacaattgccatcacaaattaagcaagcttatcgtttggctaatggtgcttttgatgaagtagttggtatcttttatggacaaaaatattttggggcaaaagccaaaaaagatgttgaagacatgatccaacggatgcttaaggtatatgaagaaagaattaatgctaataaatggctttctgctgaaaccaaaaagaaagctgtgattaagttaaaggcgttggttttaaaaattggttacccagacaagatcgaagaaatctttgacttattacaagttgatccgaaaaagagcttgtatgaaaatgaagcggcaatgtcaactgtacgaacgaaatatatgcttaataagttaactaagccagttgaccgttcagtttggctaatgccaggtaatttgaataatgcgtgctatgatccgcaaagaaatgacttaacctttccagctggaattttacaggcaccattttatgacattaatcaatctcgtggtgcaaattatggtggaattggtgcaactattgggcatgaagtatcacatgcatttgataatagtggagcaaaattcgacgaacatggaaatatgaacaattggtggactgacaaagattttgctgagtttaataaacgagttggtcaaatggttgatatttttgatggcttacaatatggtcctgctaagattaatggtaagcaggttgttggtgaaaatattgctgatctagctggccttgcttgtgtagttcaaactggggaaaatgatggggcggatttgaaagatttgtttgagaattatgctcgtagctggatgcagaaacaacgccctgaggcaattaagactgaagttcaaacggatgtccatgcgccacaaccaacgagagtaaacattccggttcaatgtcaaaatgcattctatgatgtatttaacgttaagccaactgatggcatgtggcttgatccagaagaacggattactatttggtaaaattgaataaaaaaatagtcactggatttcaatttctagtgactatttttgatatgtaattatttatcaagcatatatttacgagtcatcggtaaagttttacctgatggtccctttgtcaataggtattggataacgtcgatgttaccagactcgaaactagcagcacaagcattaaggtacatatcccacattctacagaatctttcaccaaatttcttttctacttcaggacgaacggcattaaagttcttatcccaaatttccaaggttctttgataatgacgacgaagagtttccatatcagtaatttgtaggcctgaatcgatgatgtcagtaacaatttctggtaagtagccaccagggaaaatatacttgtttaaccaagcattagtggcaccaccttgttgacgggtaataccatggattaatgcaacaccgtctttgttaaggtacttgtagacatcagcaaagtatttaggtaagttttctttaccaacatgttcaaacattcccactgaagtaatgtaatcccatttttgatcaccaagttcacggtagtcttgtaatctaacttttgcgacatcttgtaagttatcgtcgtagattcgcttttgaactaatttaaattgctcctcacttaaggtaacaccggtgacttttaaaccgtattccttagctgcagtaagcatcagagttccccagccacatccgatatcaagtagggtcttgcctttttgtgggtggagtttgtttaagatatgatgtacttttgcaatttgagcttgttcaagatcatctttattgccatcttcgaagtgggcgcaggaataggtcattgttgggtcaagccacatcttgtagaaatcattaccaatgtcgtagtggctttgaatatcttcttcgctttgcttttccgtgtgtttttgcttaggcataaacttacggaacttagaagcacgcatgaatgaatcagcactttcataagcaccaacaagcaatttttggatattaccatgaatttcgatttttttatccatgaatccttcgcccaaagctagagaagcatttcgagtgatttcactcattggaatcttttcattaaaaacaatttcaatttcaggatcaccattgccataaacttcgctcttaccgtcccagtaggttaccttaacagaaaaggggaaagatttactaagcatcattttgtaaaaagttttttctaacaattgctttttcctccaatatttaaaacctaaaaattattttaacacttatattaaattgcacaggtaaagaaaaatcagtataaagcaatatttgttttatactgatttttacttatttagcaacgtagtggaaatttggatccatttccttatctaatttgttccaagcatcttcaagttgttgaaataaaatttgttcattttcatgggttagtttagttttacgatcaatggtaattggatcaccaaagttaacttctaatggcttgcgcttaagcagtcctttaaaagttaaagggccttggtagacaacaggtaccattggtttttttgacattttggaaattaataaaactccaccttttaattcagctgaatgtcgcgtgcctgaaggaaagataattaatgataactttccttctctaagtcccttaactggaatctttaaggctgatggtccagggttatttcgatcgactgggaaagcgtgagcatgatcaagaataaatcgtaaaaccggatttttgaataattcaattttagccataaacatgaattccattggactagcacctagtgcaaaaagcagtggttcccaccatgtacggtggggggctactaaaatataattgccctgaggcaagcgatccttatgatgaatgtgtagatgaccgtttaacacccaaacgatgaaacggacaatcggacgtataattttgtaaaacattgtctcctcattgattccttcatttgatgtaagctattataaaaatataatgacgagaaaggcaaatatttttatggtagatctgaaagataatgagcgaattgactacatgtatagcgataatcttcgtattattcaagataaaacggcttttagtttttcaatggatacattatttttagcatattgggctaaagacttgatccgtgataaagataaggttgctgatttatgtgcaggaaattgtgcagctacaatctatatggcttattttaatcgtgcccattatgatgcaattgaaattcaaaacgaagtttattctcaagcagttcgttcagtcaagcttaatgagatggaaaatcgtatttcagtttttcaggataatgtgctaaatgcaggacattttttgcggaaagatagttatgatgtagtaacagttaatccaccatattttaaagcacctaagggacatgaagttaatccagatcgtaaaaaagcaattgctcgccatgaacttttgattaatttagagcaaataattgaagtggctagtggcttacttaaaatgaaaggcaaaatgttaatggtacatcggccagagcgcttaggtgagattgcttattattgtatgaagcatgacttaagcatcaaaatggtgcagccatttgtgccacatcgcggtgaagatgctaatttaattattgtagaagccgtcaagcatactggaactgatggaactgttttgaaagatgctgttgaagttcatgaatcaaatggcgacttcactccattagtacagcgaatctcacgagaaactgcagatgacaaagctaaacatgaagcacagggtaaatattacttttatgtcttactgtgtaatgatggcagtttttatggtggttttactaatgatttagaacatcgtttgaaaatgcacaatttaggaaaaggagctaagtatactaaaacacggcgtcctgtacggatgatttatcatgaacagtttgacgataagcgtttagctttgaaacgagaatattggtttaaacatcattcacgtgcttggaaggaaaaatttttgcatgagcataatataaagttttaatccttgcatactgtaatcttttcttgtagaatatttgagtatgctgtgtcagcatatgaaacttaaaacacatcaagagcaatcatcatcgtggtgcccagggtagtggttagatgatgaaatgaacgcttgagaggatataaaaccataggaggaatttaaatatggcagacgttgttacaatgaagcaattgcttgaagctggtgtccactttggtcaccaaactagaagatggaacccaaagatggctccttacattttcactcaaagaaatggtatctacatcattgatttgcaaaagactatcaagatgttagatgatgcttacaactttatgaaggctgttgcccaagacggtggcgttttcttatttgtaggtactaagaagcaagctcaagattcaattgctgaagaagcaactcgtgcaggtcaatactacgtaaaccaacgttggttgggtggtactttgactaactggtcaactatgcaaagccgtattaagagattaaagcaattaaagcaaatgtcagaagatggtacttttgatgttcttccaaagaaggaagttgctctcttaactaaggaaatggacaagcttgaaaaattctttggtggtattgaagatatgccaagaattccagatgtattgttcgtagtagaccctaagaaagaaaagattgctgttcacgaagctaacattttgggtatcccagttgtagctatggttgataccaacactgatccagacccaatcgacgtagttattccatcaaacgatgacgctattcgtgctattcgtttgattgctggtgctatggctgatgctgttgttgaaggtcaacaaggtcaagatgatgaatcagttgaagttgacttcaaggaaaatgcagacggttcagaagaaatcgttagcgctgaagaaaacccagaagactagattttactattagttccgtaggaggatctattaatggcacaaattactgcaaaattagttaaagaattacgtgaacgtactggtgctggcgttatggacgctaagaaggcattagtagaagttgacggtgacatggataaggctgttcaataccttcgtgataaaggtatggctaaggcagctaagaaggctgaccgtgttgcagctgaaggtttaactggcgtttacgttaatggtaatgtggcagctattactgaagttaactcagaaactgactttgtttctcaaaacgacaagtttgttaacttggtaaatgaagctactaagactattgctgaaggtaagccagctgatatggaagcagctaaggaattgaagatggctgatggtactactttagaccaatcattcgttaacgcaactgctacaattggtgaaaagattgttttacgtcgttttgctttagaagaaaagaatgacgaccaagaatttggtgcttaccaacacaatggtggccaaattggtgttatcactgttttagaaggtgcagatgctgcaactgctaagcacttggctatgcacatcgctgctatgagccctaaggttatttcaccagacgaattagatgatcaatttatcactgatcaattagctgtgatgaaccacaagattgaccaagacaatgaaagtcgtgcattggtacataagaaaccattacctcaccttgtttacggttcagctaagcaattaactgatgatgttttggctaaggctaaggaagacatcaaggctgaacttaaagaagaaggtaagccagaaaagatttgggacagaattattcctggtaagatgcaacgctttattgatgataatactcaagttgacaagcaatttgcagtgttatcacaagactacattatggacgatagcaagactgttggcgaatttttgaaggaaaaaggcgctaagttagttgctttccaacgttacgaagttggcgaaggtatcgaaaagaagcaagaagacttcgctgctgaagttcgtgaacaaatgaagtagtcattattacataattatcatagaaaggaggagtacaccgtgtgctccttctttttttgtaaaaattttgtagtgttttaaatgttaaaagacattgcggcattagatatggtagaataattaaagctattagaggaggtcattatgagtcaagttaaatataaacgtgtcattttaaaaatatcaggtgaagctttagcaggtgacaagggtacggggattaatcctactgtaattggtcacttagctaaagaaatcaaatcagttcatgatttaggtgttgaaattggtatcgtctgtggtggcggtaacatgtggcgtggtgaaactggcgctaagttgggtatggaacgtgctcaagcagattacatgggtatgttagcaactatcatgaatggtttagctttgcaagatggtcttgaaaaaataggtgttcctactagaatgcaaacttcaattgaaatgagacagattgcggagccttacattagaagaagagctttgcgtcaccttgaaaagggtcgtgtagtcatttttggtggtggtactggtaatccatacttctcaactgatactactgcagcccttcgtgcagctgaaattggtgctgatgtaattttgatggctaaaaacggtgttgacggtgtttactcagctgatccaaagactgatccttcagcaactaagttctcagaattaactcaacttgatttaatttcaaaagacttgaaggtcatggatagaactgcaagttcactttcaatggatactgaaattccattaattgtctttaacgttaatactccaggcaatatcaagaaggttgtattgggtgaaaatattggtactgttattagaggtgataaataatgaataacgaaactattgaaaaagcaaaaactaaaatgacggattctattaaggtttatcaaaagagattagcttctatccgtgcaggtgttgctaacgctgctcttcttgataatgtccaagtagaatactatggggcaccaactccattgactcaaatgtctagtattaccattcctgaaccacgtgtattgcttattactccatatgatcaaaattcattagatgatattgaacatgcattgttggcttcaaacttaggattaactccggcaaatgatggtaaggtaattagattagtaatccctcaactcactggtgaaagaagagaagaaattgccaaagaagttggaaaatttgcggaagaagctaaaattgctgtgagaaatgttcgccgtgatgccatgaatactttgaaaaaagatgaaaagaatggtgatattactgaagacgaacaacgtaacttagaaaagcaagtacaaaaagtaactgatgatgctgctaagcagattgaccaacttgctgatgaaaagcgtaaggaaattactcaaggttaaagatgagtaataaggataatgaattaaatcatttagccattattatggatggtaatggacgttgggcaaaaaagaggcatagacctcgttttgttggccatcgagagggaatggataatgttgagcggattactttagctgctgataaattaggaattaaagttttgacactttatgctttttctactgagaattgggctcgtcctaaagaagaagtagcttacttaatgaacctccctgttcgcttttttgataaatacatgccaacattgatggaaaataatgttaaggtaaatatcatgggctatttggatgaattgcctgaaaagacttatcgcattgttcaacgtgcaatgtcagagacggccaataatacaggcttaattctgaattttgcttttaactacgggtcaagaagagaaattacgtctgctatgcaggagctcggtggaatgattgaagctggttcactaaaaagcgaagaaattactgaaaaaatgatttcagaccatttgatgactaaaaactttggtccatatcaagatccggatttattaattagaacgtccggtgaacagcgaatttctaatttcttattatggcaattagcatattcagaacttgcctttagcgaaaaaaattggccagattttgatgaaaatgatttaaaaaaatttgtagaagattataagcaccgtaaccggcgctttggtaaagtagacgaatcggatagttaaatatgaaacaacgtacaattacggcaattattgccttatgtctttttattccaattgtgctcgcaggtggcctttggatggattggctgactgtattattcgcagcagttggcattagcgaaatctttttaatgaagaaacaaatcttagtttcttttaattttttgttagccttacttgcaactttaacctggacagttccagactcattctttaaagtatttccttcaaatatcactaaattaggtgtgttttatggaattattatgttgttcttgacctggactgttctttcaaagaataaaaccacttttgatgatgtaggtgtatatattttggctgcactttacattggaataggttttcactatatggcagccattagagcatacccacaaaacggtttagcattgctgggttgtgtttttgttgttgtttggtccactgatatcggtgcctacatgattggacgtaagattggaaaacataaattatggccagttattagtcctaataaaacatgggagggctcgatcggtgcagttgtttgtgccttaatttgtagtgccatctatatggcaattcttggcagcttgggtattaactttggtgtatctgaattaacgatgattattctggcctttttcttatcaattgttggtcaaatgggtgatttagttgaatcagcttacaagcgtttctatggtgtgaaagattccggaaagattttgccgggtcatggtggtatcctggatcgctttgatagtatgctgtttgtattgccagtagtggctacaattttaggtattgttcattaggagaattttttattgaagggtatactaatctttatcgtcgtctttggtatattggtatttgtccatgaatttgggcattttatcgtagccaaaaagtcaggtattttggttagagaattctcaattggaatgggtccaaagctttttcaaattagacgtaaccccaccacttataccattcgttggttaccacttggtgggtatgttcgtttagcaggcgctgacgatgaaagcaagctggatcctggtatgacggttgttttacaattgaatgaacaaaatgaagtagtgagaattgatgcttcagaaagcgaaataccaattgaaggaattcccgttcaagtaacaaaggctgatctagtagacgatttaataattaagggttacgaaaatggcgatgaaaatgatccagtaacttatcacgtagctcatgatgcaactattattgaaaaaaacggaactgaattaattattgcgcctcgagatacacaatttaatcaagctaatgtttggcaaaagttggcaactaattttgctggaccttttatgaacattcttcttgggtttgtagtatttttaatctggacatttacagttccaggtccagcaacaactacagttggatcaactcaggctaattcaccagcgcgtgatgcaaaaattgtgactggtgatcagattgtggcaattaatggacaaaagattaataattttgatcaagtgtcacagcagattaatcaaagtaaaggcaaggtcttacactttgaattaaagaaaaatggtcaaattaggaaagttacagttaagccaaaagctcataaaattcaaaaacaaacagtttatcaaattggtattgtagctaagagcaatgagaatgcagttgttaaattaaaacgtggctgggatacagctatttcaactaccggtctgattttcagagccgtaggtaacttatttagccactttagtttgaataaattatcaggtccagttggaatttattctcaaacttcacaagtttcacaaatgggctttacttatgtattagcctttttaggaatgatttcgattaatttgggaattgtcaatttaattccaattcctgggcttgatggtggtaaacttttattgaacttaattgaattagttcgcggtaaaccgatttctgaagaacatgaggcaattgttgaattaattggtttcggcttattattagttttaattattgcagttacaggtaacgatatctatcgctattttattaaataattatattttttactttaggagataagaatgcgtcaatcaaaattttttatgccaactttgaaggaagcaccatcagatgcagtggctgaaagtcataagctgatgattagaggtgggtatattcgtcaagtcacagctggagtttatgcttatcttccattaggctaccgtgttttacgcaaggctgagggaatcattgaacaagaaatggataaaattaatgttccagaaatgattatgcctcatttacttcctgcaactttgtggcaagaaagtggccgttacaagaaatatggtgcagaaatgttcaagttaaaagatcgtcatggacgtgaaagcttgcttggacctacacatgaagaaacttttaccgaaattattgctaagaacttaaagagttacaaacaaatgccacttgctttgtatcaaattcagactaagtttcgtgatgagaatagacctcgttttggccttcttcgtgggcgtgaatttgtaatgcttgatggttacagttttgctgcaactcgtgatcaattggatgaacaatttgatgatcaaaaaaatgcatataagcgtatctttaaacgtgccggtgttactgttcaccctgtaattgctgactcaggtacaatgggaggtaaaaactctactgaatttcaagcccctgctgctatcggtgaggatacaattgctactaatgaaaaaggaacatatgctgccaaccttgaaatggctaagagtattgatactttcaagcaagaaccagaagatgctaagcaattaactaaggtagctacgccaggctgcgatacaattgaaaaattagctaaattcctcgatgtaccagttactagaattgttaaaagtattttatacattgctgatgaccaaaaagttttagtattaatccgtggtgacaagcaaattaatgaggttaagttgggtcatatccttgacgctgatgaggttcatgaagcaaatactgctgatttaaaggaaatcactggtagtgaaaagggtggcgttggtcctgttaatgcagattgggctgataagattattgcagatgaaactgttaagaatctttacaacgttgtagttggtgcaggtgaaaccgattatcaatttgaaaatgctaacttagaccgtgatttcaaggtggatgaatttgctgatattcggactgctaacgaaggtgaaccagatcctgttgatcatttaccgcttaagttcactacttcaattgaagttggtcacattttcaagttgggtacttattacactaagaccatgggtgcagatttcttagatcaaaatggtaaagcaaagcctgtcatcatgggttcatacggtattggcgttactagaatgttatcagcagctgttgaacaacacttaactgaacgtggtgttgcatggccaaaggaaatcgctccatttgcaatacatattgttcaaatgaagatgaataaagaagatcaaactgaattagctgaaaaacttgaaaagaaattcagtgaaaagtatgatgttttatacgatgatcgtaaagagcgtgctggtgttaagtttgctgatgcagatttagtcggtgcaccaattagaattacgattggtaagaaggctgctgatggcattgttgaagttaagcgaccaactgatgacaaagcaaccgaaatgtcaattgatgaattagataagtttgtaaatcaagagttaggataatttttgtggcaaataaaaacgatcttttcttaaaattgctcaaacaggttcaatttcctgatatttttgaagacaatgcgcttctacaaaaagggaaaattgaaaacgtggatgtttacgctaaagaacacaggtgggatatccacgttttttttgatactcccttgatgtatgacacctatgtagcattaagaaaagctgtagaagaaactttttcttcttttgtaaatgtaagattttatgttggaacagctgatggttctgatcaatatttaccagattattggcattatgtagttcaaaattcaaatattttgcaacctgtggctcgtgaatttttggctggccaaaaacctaaaaaagttgatggccgctgggttattccagttgataataatgtgattgatggtttaattgagcagaaggctttagatgatttagctgaagagatgcgtgattatggcttctttaatttgaaatttataactcagctggatcagacaagttctaaaaacaatttagaaagtttgcaggagttgcaacaagagcatgaaaaaagcatgcaggaagtctttgagaagacgccagacaaacctaaaccgcaacaacctaaacagtatccaactagacgtactaattatggtaaacgtaaattagatgaaaatgctccaattacacaaattaaagagctggaagatggcgtacgtaatgtagtaattgagggaaatatttttaatgttgaaactcgtgagcttaaatctggtgcaatcattttttctggcgaaattacggattatagtgattcaattgcatttaagaaatttgtttctaataaagatgaaattgaagagctatctgcaattaaaccaggaacttgggctaaaatgcaggggtcagttgctgatgatcaatatatacatgatgtagtttttaatattagtagcttagagactgtcgagcatgttgggcgaactgaaaaatacgaaggtgagcctaaacgagttgaactacatgttcatactaatatgagtcaggttgacgcaactaatactccgacggactttattaaaactgctaagaagtttggacaaaaggcaattgcgattaccgatcatggtgatgttcaatcattccctgaagcatatagcagtggtaaagcactggacatgaaaatattgtatggtgtagaagctaatatgattgatgatcatgctttactagttttgaatcctgcaccgatgacctatgaaggccgcgagtttgtaatttttgacgttgaaactacggggttgtcatctgtttacgacacaattatcgagattggtgcggttaagatgaagaacggagaagtgcttgaacgctttgataagttcattaatccgcaccatcctttaagtgagcaaactattaatttgacttcaattacagatgaaatggttggcgcagccgatgatgaagcagttgtcattaagcaattccaagacttttatggcgatcgaccactgtgtggacataacgttcaatttgatgttgggtttgttaatgcagcattaagacgtgcagggctaaaagaaattactcagccagtagttgatacacttgaagtatcgcgtttactacatccagagcagagtcgccatactttagattcattagctaagaagtataatgtttccttggaacaccatcaccgggcaaatcaggatgctgaagcaactggctatttaatgtttaaattgttagatgcttttaataaaaagtatcatgaaaataatttgaataatttgaatggctatgcagcacatggtgaagtttataaacgagcccgtccttcccatatgacagttttggcaaaggatcaagctggattaaagaatctttacaaattagtatcaattgccagcacgaaggactttttccgtattcctcgtacgccgaagtcagatttggctcgtttgcatgatggtttactttatggttctggttgttggcaaggcgatgtctttatcgcaatgatgcaaaaaggttacgacgaagcaagagaaaaagctaaattttatgattatcttgaagttcaacctccagcaacctattcgcaattaattgctgatggtttgattaaggatgaagatcaattacatgaaattattgaaaatattattaaattagggaaggaattaaataagcctgtagttgcaactagcgatgcccactacgttgaccaaaaggacgctatttatcgtaaaatcttgattgcggctcagagatcaaaccctagtcgaaataagccacagccagatttgcatttctattcaacacaggaaatgctagatgcattttcattcttaggcgaagatgtggctaagaaaattgttattgacaataccaataaaattgctgatgaattgtcagaaattcagccaattaaagatgggttatacccaccacatattgaacatgccgatgaagaaatgaagaagttgacctatgataaggcttatgaattatatggtaagccattaccgaagattgttaaggatcgaatagatttggaattaaattccattatttcgaatggttatgcggttatttacttgatttctcagcgtttagtagctaagtcaaataaagatggctatttggtaggttctcgtggttctgttggctctagtctagtagcaacgatgtcaggaattactgaagttaatccgttagctccacactatcgttgtcctaactgtaagtattcacaattctttgaaaatggggaatatggttctggttttgacttgcctgataaagattgtccaaaatgtggaactccattagttaaagatggacaagatatcccatttgcgactttcttaggatttcacggcgataaggttcctgatatcgatttgaacttctcaggtgactatcaaccagtagcccataattttattcgagtaatgtttggaccagataattcatatcgtgctggaacgattgcgactgttgcggataagactgcttacggttatgctaaacactacgatgaagagcatgatttaaagctaagaaatgcggaattagaccgtttggcagctggtgtccgtggtgtcaaaagaactactggtcaacaccctgcaggaattgttgtagtgcccgatgatatggacatttacgattttacgccggtatcgtatccagccgatgatgtaaatgccgcttggttgattactcactatgacttccactctattcatgataatattttgaagtttgatattctgggacatgatgatccaactatgattcgtcacttgcaggatttgtctgggattgatccattgactattccacccgatgaccctggagtcatgtcattattttctagtcctgatattttaggtgttactccagagcagattcaatcagaaactggaactttgggtgttccagaatttggtacccgttttgttagaggaatgcttgaggagactaagccaacgacattttctgaattattacagatttcaggtttgtcccatgggactgatgtatggctaggaaatgctgaggacttaatcaatcaaggaatttgcaaactgaaaaatgtaattggttgtcgtgacaacatcatgatggacttaattcactggggcgttaagccagaagttgccttttcaacaatggaatccgttcgtcatggtcgtggcatcagcgatgaaaatatggctattttaaagaaaaataagaatattccagattggtatattccttcttgtctgaagatcaagtacatgttccctaaggctcacgctacggcttacattttaatggctctacgaattgcttggtttaaagtatattatcctgaaatctattacacagcttacttttcagttcgtgccgatctatttgatttggttgcaatgagtcatggtaagaatactgttaaggctgcaatgaaggaaattcaggataaaggaaacgatgcatcagctaaggataagagtttgatgaccgtgctagaaatagctaatgaatgtctagaacgagggattaagatcaaaatggttgatattgatcaatctgaagcaactgactttaagatcttagataagcatacaattttagcaccgttcaatgctgttcctggtttgggggataatgcagctaagcagattgtagctgctcgtgcagaaaagaagtttttgtctaaagaagatttagctaagcgcggtaaagtatcacaaacaattatgaattatttcgaagaaaatggtgtcttggaagggatgccagatgaaaatcaattatcacttttctgatagttaaattttacaagatcaggtaaaacatggtatactacgtatgaagttcgaataggtaaattcgagtgagcagtgatgctcactctttttattacggaggaaaatttttgtctaaagttatagattctgttcgtccagttgtcgaaacaattattgatgaacatggtgacatgttggttgatatggaatacgttaaagaaaaagggcaaaattatttacgcatttatgttgatcgccaaccaaacggtattgacattgatgagattgcagctttaagtgaacttgtttccgaaaagctggatgctcttgatcccgatccacttccagatccctatgttttggaattatcatctccaggggcagaacgaccaatcaaaacaaaagctgattgggaaaaagctctgaatgattacattcatgtcggtctttatcaaaagattgagaataaaaaaatgtatgaaggtacactcaagtcttataatgatgacgaagttgtattagaaataaaagataagacaagacgaaaaacattaactgttccccgtaagttaattgcaaatattcgttttgcaattgaattttagaaaggttgatcaaaaacttatgtctaaagaaatgctagaagcgtttgctactttggaaaataccaagggcattaagcaagatgttattgttgatgcaattaaagccgctttggtagctgcatacaaaaagaattataatcaagcacaaaacgttgaagttgattttgatgaaagaaaaggtaacttcaaggtaatggcagttaaaactgttgttgacgaagtgcaagatgaccgtcttgaagttagtttaaaggatgctttaacaattaatcgtgcttatgaagtaggcgacgaaattcgttttgaagtaacacctaaaaattttggtagaattgccgcccaaactgctaagcaagttatcatgcaacgtctacgtgaagccgaaagaaaacatattattgatgaatattcacaatatgaagatgaattggttactggtaccgtggaaagacgcgacaatcgtttcgtttatgtaaagattggtaatgttgaagctgttatgcctcaccgtgatcaaatgccaaatgaggtttacaatccccaagaccagattcgtgtactagtaactcatgttggctccgatagcaagggtgcacaaattacagtctcaagaactgctcctgacatggttaaacgattgtttgaacaagaagttccagaaatttatgatggaaccgttgaaattgtttcaatcgcacgtgaagcaggtgacagaactaagatggctgttaagtcaaatgatcctaacatcgatccggtaggtacctgtgtaggccaaaagggtgctcgtgtacaaaatgtagttaacgaacttggcggtgaaaatattgatatcgttaagtatgaagaagatccatctgactttattgctaatgcattaaatccagcagaagtgattgcggttcaatttggtgatgatgaagaagaaaaaagtgctttagttatcgtaccagattaccagttatcacttgcaattggtaagaaaggtcagaacgttcgcttagctgctcgtttgacaagctataagattgatattcgtcctgaatctgaagtagaatttgtagatgaaaaaacaaatgatacagctgatgctgcagatagtagcgaaacttctgaaaatgttgaaagtacagatgacgctgctgacgttgaaagctcagatgatacaactactgtagaagattcaagtaaagaagataaaactgaagaataggtgattttttgaaaaaaagaaaaatcccaatgcggaaggatttattaaccgatacaatgcagcccaagaaggaattagtacgtattgttatcgataaagaaaaaaatgtgtcagttgatccaacaggtaaaaaggctggtcgcggcgcatatgtttcccttgatccaagtaagattgaagctgctaaagagaagaatgtattagaacgtagtttaggtgcgaaagttccagatactttttacgatgagctttactcttatgttgatcatcaaaaggcaagaaaagaattatttggtgataaataagattgcaaaatagacaaaaagcaattaatttgttaggtttagctgagcgtgctggtaagttaactaccggtacagagacagtcattaatgaacttaataagcacaaaatcaaagcggttattatggctagtgatgttcaagacaacacggcagaaaaagtaaaccgcgctgccagaaaagacaatattcctatgataactatgtttactgccattgaattgtcaaaggcaattggcaaaaaacgcaaagttttaggattaactgatgctggttttgctaaggcgttagttaaaaaaataaatgaaggagtgtgattggatggcaaagaaaagaatttatgaaatcgcaaaagaagtcggcgttgataacaaagttgtagtccaaaaagcaaaggatttaggcttagatgtaaagaatcacatgtcatcagtagatgattcacaggttgcaaagttaaagaatagtttccaaaactccgctcctgctgcaaaatcttctaataaaaagaataaaataaaaatctctgtttcttctattcgcaaaaatgaaaagaagcaagaagataataatagttctaagaattctaagagacgcaataataaacgtcgttcaaataatcacggtcatgagaataaaaatgatcgtagaaataatacaggtaagccaaaggcagctgctttgttacaacaatttaaacaaaagcaacgggcagaagaagggcaacttaatcgtgaagcccaaaaagccagaaaagaatatcatgagcaattaagacatccaaaacaagaacagccagtgaaagataataagaaaacaagcaaccacaaagataacaagaagaaagcagaaccagtagaaaagaaagttattggtcctaagattttaaagccttctccagctcgtttgaagaagcaacagcctgaagcgactaaagaactagttcaagttactattcctgaggctcctaaggaagaaaaacgcggcaataatcgtggtcgcaacatgggaaagccaggacgcaagggtaaaaatcaatttggcaatggtcgtagtgaccattcagatcgttcagagagaaagcggcgtaagaataaaaaacgtcaacaagagcaaaagccaaagaaaacacttactaagcgtaaggaacgtccattaccagaaacattagtttacgaagaaggtatgaacgctcaagatattggtaagttaattcaccgtgaaccagctgaaattgttaagaaactcttcatgcttggcgtgatgactaaccaaaaccaatctttggataaagatacaattgaacttttagctgctgaatatggtatcaatgctgagcaaaaagttcatgaagacatctctgatattgataatatctatgacaagagaatggaagagtcaaaggaatctaaaaaccaggttaaacgcccaccagttgttacaatcatgggacacgttgaccatggtaagaccactttacttgatcgtcttcgtcatactcatgtttcagctcatgaagctggtggtattactcaaaagattggtgcttaccaagttagattagatgatcgcttaattacattcttggatacaccaggacacgcagcattttctaacatgcgtgcacgtggtgctgaaattactgatattgttgtactggttgttgctgcagatgatggtgtaatgccacaaactgtagaagcaattgaccatgcaaagagtgctaatgttccaataattgtagcaattaacaagatggataagccaggtgcaaatccacaacacgtaactgaggaattaatgaaatacaatttgattcctgaagattacggtggtgatactatcttcgttaatatttcagctaagacaggtcaaaatgttgatgacttattacaaatgatcttgttgcaatctgatgtgatggaacttaaggctaatccaactgaaatggcaattggtactgtgattgaagctcgtttgtcacgtggtcgtggacctgtagcagacgttttaatccaacaaggtacacttaatgttggtgacccgattgttgttggtaacacttttggtcgtgttcgtactatgactaatgatcgtggacgtcaagttaagaaggctacaccatcagaacctgttgaaattactggtttgaacgatgtgcctgaatctgctgataagttagttgaatttaaggatgaaaagaccgctagaagtgttggtgaagctagagcacaacaagctttacaaaagtctcgtgaaaatgttcaacacgtaactcttgataacctcttcgatactatgaagaaggaaaacatgaaggaagttgacattgtcttgaaggctgatgttcaaggttctgtagaagctttacaacaatcgcttgaaaagattgaagttgaaggcgtacgtgtaaatatcattcactcaggtgtaggtgccattaatgaatcagatgtaactttggctggtgcatcaaatgcatttattattgggttcaacgttcgtcaaactgctactgctaagagccaagctgaaaccgatggcgtagatattcgtctttacagcattatttacaaggctattgatgatgttactgctgccatgaagggtatgcttgaaccaacttatgaagaaaaggttatcggtaatcttactgttcgtgaaacttggaaggtttctaaggttggtacaattgctggttccttcgttgataagggcttggttaagaatgattctaagattagagttattcgtgatggtatcgttaagtatgatggtgaaattgcttcacttaagagatttaaagatgatgttaaggaagttaagcaaggtaacgattgtggtttaacgattaaggactacaacgacattaaagttggcgacgaattcgaagtttacgaaatgcaacaagttgagcctaagtaattactattaggaggaaaacatgaagcatagaattggtcgtgttgaaggtgaaattctacgcgaattaaccaagattttacaaaagaatattcgtgatccgcgcttaagtggtgtaactattaccgcagttgaatgtacgaatgatctttcatatgcaactgtttattacagcctgctaactgaagatgagcataaggaagaagaggttcaggcaggttttgaaaaggcaaaaggcatgatgcgtcatttgcttggtcaaacattaactgtttataaggttcctgaattaatttttaaacgtgataattcagttttgtatggtagtaagattgaccgtttgattgcagaagttaagaaacaagatgctaagcgggaaagcaaataaaaaagagggcgccgtgatggtgccctttttttgttgaaaagaatagggaataattatgttaaacggaattttagttattgataaagataaagggatgactagtgcagatgtagtttatcatttgcgccgcgtattacatattagaaaaataggacatgctggtacgcttgatcctgaggtgacaggcgttttaccaattgctattggtcaggctactaaattaattgaaatgatgcatactaggccaaaagaatatattggcacgggactatttggttatagcacagatagttatgatgcaactggaactgttttaaaagaaaaaaagttgattcagcctttttctggtgcagaaattcaagaaaatatgaataaatttgtaggagaaattgttcaagtgcctccaatttattctgctgttaaagtgaatggtaaacatctttatgaatatgcacgtgaagagattgaagtcgagcgacctcagagaaaggttgaagtcaaacaatatgatctaactaaagaaccagtttttgatataaatactgggcaagaaagctttgattttaagattaaatgcagcaaaggcacttatgttagatcgttagttaatgatctaggtgaaaaattagattgccccgcaacgatgacttatttgagaagaacagctagttctggctttgatattacacaagcagtaaaattaaaggagattgaagagaatccgaaaaaggccactgaacttatacagccgattgatgcattttttaaggaatacactcaggttgatttaactgaagaaaagtggcttaaagttaaaaatggagcgggtatttcgcttgaaactaatgcgaaaaaagttgcactacgatacaataaaaaggtgaaagcaatttatgaaaaaaaaggaaagctttatcgcccaagcttaatgctgttgcaaaatgaataaatgaaatgaaggaattagctgtgaaaatcgttcatttaacatatcctgttaaggaaaatattttatctactagaattgtgcttgcccttggcttttttgatggggttcatttgggacatcagcgcttaattaatcaggctaaagaaattgcattacagaagaaattgtcattagttgtgttgacctttgatcgacatcctaaggaagtttatgagtcgaaacgagattttaaatacttagaaactttggaagaaaaagctaacaaaatggcggaattaggagtagattatttggctgttttaccatttactaaaaatttcagtcaaatttctgcacaagaatttgtcgataatgtaattgtcagattaaatgctgataccgttgttgctggctttgattacacttatggttctaagaatattgcaaatatggctaatttaccccaattttccaaagggcgttttaatattgtagtgatgccaaagcaaacttttaacggtagaaaaattggctcaactgaaattcgtcaagcaattaaggatggtcagatgaaattagccactgaattaatggggcaccattatgtaatgagtggtatcattgggcatggtaaacgaaatggtcataagctaggctatccaacagctaatttgatttgggcagaacataaggtgattcctaaaattggagtttatgctaccaagactaaagtaaatggtaagtggtataactccatgactagcgttggctataatgtaaccattaatcaggacaagaagatatatattgaatctaatatttttgattttaatgaagatgtctatggtaagccaatgaagatcaaatggtataaatataccagaggtgagaaaaaatttgccggattacctgaactgaaagagcaacttgaacgagatgagcaagaaattagggcttattttaagcaaaagggttaagaagctacgtactttgaaaaaagtgcgtattttttgaataaaattagcaatctacttgatttagtgctaatttctggtatcatattaactgttagcacctgagagatgtgagtgctaaaagtgagggcgatataatatgttgaccgagcgtcaagagcttattttaaaaacaataattacagactttacacaaagtcatgagccagtaggctcaaagaccgtaatgaagcagttgccaattaaagtttcaagtgcaacgattagaaatgaaatggccgtgttggaagagcaggggttaattgaaaaaactcactcttcaagtggtcgaattccttcaagcgagggctatcgttattatcttgataatttagttgagccgttgcaattaccagagtctgtttataatacaataggaagccaattagatcgaccttttcatcaagtaaatgaaattgtacaagaagctgcacgaattctgtcagatttaactaactataccgcatttgcggaaggacctgagagtcatgatgttagagtcacaggatttagaattgtaccgctgtctcaacgacagattatggcaattttggttacaagtgatggtaacattcaaaatcaggtatatgctttgccacataatattcacggcgaagaaattgaaaaggctgtccgcatgattaatgatcagttagtcggaaagagcctaaatgaaatcaacgtttcgttgctaagtgaattagctaaaaacgaattaggcggcgaacatgtgactgaattgcttagtttagttgaagatgtcgtaaaagatgcagctagtgagcagatgtatgtggatggacagattaatttgctcaataatacttctgaacatgatgtaaatgacattcgttctttgtacgagttgattgatcataataatctgttcactaatttaatggatgcaaaggtggatccaaagtctggaaattatccagtaaaggttaagttgggatctgaattacccaatgatttattaaaaaattatagtttgctgacagctgagtacagcgttggctcccatggtaaaggaactattgctttacttgggccaacgaatatgccatattcacaaatgattgggttgcttgaatattttagaaatgaactagctaaaaagttgcttgattattatggcaagtttcaataaaggaggttagccgtgagtaaagaagaatttccaagtgaaaaaaatctagagcaaaaagaaaagacttctgagcctaaggctaaaaaagaagccgataaaggtgaagaaaagaagcaagaaaaaaataaacaagatcaaaaattagctaaagaattagctgatttaaaagataagaacaaggatcttgaagataagtatttgcgtagtgaagcagaaattcaaaatatgcaaaatcgctacactaaagaacgtgctcaattaattaagtacgaatctcaaagcttagcgaaggacattttgccagcaatggacaatttggaaagagccctaagcgttgaggccgatgatgatgtgtctaagcagttaaagaagggcgtgcaaatgaccttggatgcacttgtgaaggcaatgaaagatcacggtgtagttgagattgaggctgatggcgttaaatttgatccgacattacatcaagctgttcaaacagtagcagctgagaatgatgatcaaaaagatcacgttgttcaggttttacaaaaaggatatcaatataaggatagaacactaagaccagcaatggttgtagttgctcaataagagaggaagctaatatatgtcaaaagttattgggattgatctggggactactaactcagcagttgcagttcttgaaggtaaagaaccaaagattatcactaatccagaaggtaaccggactactccttcagtagttgcatttaaagatggtgaagttcaagtcggtgaggtagcaaagcgtcaagctattaccaaccctaataccattgtttcaattaagcgtcacatgggtgaagctgattataaggttaaagttggtgataaggaatatacaccacaagaaatttcagcatttattttacaatatattaagaaattctcagaagattacttgggtgaagaagttaaggatgctgttattactgttcctgcttacttcaatgatgctcaacgccaagctactaaggacgctggtaagattgctggtttgaatgtgcaaagaattattaacgaaccaactgcttcagcattagccttcggtttaaataaagaccaagatgaaaaagtcttagtatacgaccttggtggtggtacttttgatgtttctgtattgcaattaggtgatggtgtcttccaagtattgtcaactaatggtgatactcatcttggtggtgatgactttgatcaccgtatcatggattggttaattaagaactttaaggatgaaaatggtgttgatttgtcgaaggacaagatggcaatgcaacgcttaaaggatgctgcagaaaaagcaaagaaggacttgtcaggtgtatcaagtactcacatctcacttccattcatttctgctagcgaagctggtccattacaccttgaagcagatttaactcgtgctaagtttgatgaattaactgctgacttggtagaaaagactaaggtaccatttgacaatgcattgaaggatgcaggtcttactgttaatgacattgacaaggttattttaaatggtggttctactcgtattccagctgttcaaaaggcagttaaggaatgggctggtaaggaacctgaccattcaattaaccctgatgaagctgtagctatgggtgcagcaattcaaggtggtgttatctcaggtgatgttaaggatattgttttacttgatgttaccccattgtcacttggtattgagaccatgggtggtgtcttcactaagttaatcgacagaaacactactattccaacttcaaagagtcaaatcttctcaactgcagcagataatcaaccagctgtagatgttcacgtattgcaaggtgaacgtccaatggctgcagacgacaagactcttggccgctttgagttaactgatattccaccagcaccacgtggtgttcctcaaattcaagttaccttcgatatcgataagaacggtattgtaaatgtatctgctaaggatatgggtactggcaaggaacaaaagattactattaagagttcatccggtttatcagatgaagaaattaaacgtatgcaaaaggatgctgaagaacacgctgatgaagataagaagcgtaaggaagaagcagaccttagaaacgaagtagatcaattaatctttactacagataagactttgaaagatactaaggataagctctctgatagcgatcgtaagccagttgaagatgctcttgaagctttgaagaaagcccaaaaggacaacaacttggatgaaatgaaagaaaagaaagatgctttatccaaggctgctcaagacttagctgttaagttgtatcaacaaaatggtggtgctgctggtcaagctggtccacaagcaggtcctcaaggcccacaaggtggtaattcaaataatggcaacaacggtaatgcccaagatggtgaattccacaaagtagatccaaataagtaatgggtttataattaaacaaaaggagaaaagaactacccattgagtagttcttttcttttgagaatacaaggagttcaaatagatggcacaagaagattactataaagtacttggcgtagatcgtgacgccagtgatcaggaaataagtagggcatatcgtaaattagccaaaaaatatcacccagatttaaaccatgaacctggagctgaagaaaagtataagcaggttaacgaagcctatgaggttttgcatgataagcaaaaacgtgcgcaatatgatcaatttggttctgctggtgtaaatggtcaaggtggctttggtggtggagctggtcaaggctttggcggtgccggatttgatacttctggctttggtgattttggcgatatctttggcgatatttttggtcaaggccgtcaacagagggttgatccaactgcaccacaacgtggccaagatttggattatcaattgacaattgattttatggatgccattaagggcaaaaagacccaggtcagctatactcgaagcgaaacttgtgaaacttgtggcggtaatggttgtgaaaaaggtacacatccaattacctgtgataaatgtcatggaactggttatatgacaattactcaacaatcaatgttgggcatgatccgtcgtcaaaccacttgtgacaaatgtcatggtcgtggtgtgattattgagcatccatgtaaaacctgtggcggtaaaggaacagttgaccgtaagaatactattgaagtggatattccagcgggaatcgacaatggtcaacaacttagatatcaaggccaaggcgaagcaggtataaatggcggaccatatggtgatttatatattaactatcgaattaaaccatctaaagattttgagcgtcgtggccagactatttatacagaagtaccaatctcatttgctcaggctactttaggagatgaaattaacgttaagactgtgcatggtgatgtaaagctaactattccagctggtacgcaacctaataagaagtttactttgcgtggacagggtgtgccatatcttcgtggtaatggcaatggtgatcaaattactacagttaatattgttattccaaagcacattaatgataagcaaaagaaagatttgaccaactttgttcatgatggtggtggcaatattacaccacaagaaaaaggattttttgaacgcttaaaagataagtttaatatgtaaatgctaaaaaggtttctgctacttgcaacagaaaccttttttaagatcaattaattttttggtgatttttagagtttttcttggaaaatattcaatgctgaattttcaattattattctaaaaactctgcattttattgaaaatttactatgctacaatttcatcatttattctagctttgctataattaatacatagtaaagggtgaacgattttatggatttaaaaaaattaaaagactatcaaaaacacattcgaaattttgctattgtggcgcatattgaccatggtaaatcgactattgctgacagaatcttagaattaactgatacagttagtcaacgtcagcttaaaaatcagatgttagatgatatgccacttgaacgtcaacgtggtattaccattaaaatgaactcagttgaagtgaaatatcatgctgaagacggtgaagactacattttccacttaatcgatacaccaggacacgttgacttttcatatgaggtatcacgttctctagctgcctgtgaaggtgctttaatggtggttgatgcttctcaaggtgtacaggctcaaactttggctaatacttatttggcaattgatgatgatttggcaatcttgccagtaattaacaagattgacttaccatctgccgatgttcctaagactaaggaagaaattgaagaaatgttaggttgggatgcttcagaagctgccgaagtttcaggtaaaaccggtcaaggtattaaggacatgctggaaaaggtagttaaagatattccagctccgtctggtgatattactgctccattaaaagcattgattttcgactctaaatatgatgattatcgcggagtggtaatgtctgtcaaaattgaagatggatctattaaaccaggcgatcgaattcaaattatgaatactggcaaggaatatgaagtcacagaggttggtgtttctagtcctcatccaattaagaaggatattttaatcgcaggggatgtaggatatattactgctaacattaagtccgttcgagaaacacgtgttggtgacacaattactcaagctgataacccaacggctgaaccacttccaggctatcgtcaaattccaccgatggtttattctgggatgtacccagttgacaaccgtgattatgaagatttgaaggaagctttacaaaaactacagctgaatgatgcagctttagaatttgagcctgaaacttcaacagctttaggctttgggtttcgttgtggcttcttaggcttacttcatatggatgttgtacaggaaagattagagcaagaatttgaccttgatctaatcatgacagcaccatctgttgattatcatgcaattatgaatgatggaacaaccaaggtgattgataatccatctgatttgccagatgctggtgaatataaggaagttcaagaaccttatgtaaaagcggaaattatggtgccaaatgattttgttggtccagtaatggagctttgtcaacgtaagcgtggtgaattcgttaccatggattacttggataagtaccgagttaatgtaatttacaacatgccattagctgaaattatttttgatttctttgatgatttgaaatcttcgactaaaggttatgcttcacttgattatgaaattacgggttatcgtgctactgatttggttaagatcgacattttgcttaacaaggagccaattgatgcattgagttttattgctcacagatcagaagctcaagatcgtgcccgtcaaatgacttcaatgctaaaaaaactaattccacggcaaaactttgaagttgatattcagggcgcaattggagctaaaattatttctcgagctacaattaagccataccgaaaagatgttacctggaaaatccatactggtgatccagatcgtcgggctaagctgcttgaaaaacagaaacgtggtaagaagcgaatgaaagcagttggtagagttgaagtacctcaagatgctttcatggcagtcttgaagatgaacgatgatgacatcaaaggtaaataagatttgctagcattcccaacctgacgcggtttgtcgtcactctgagaatgctttttttgcttttctactgaaaatctactgaataaatatctttaaaagttcaaattatcaattgatcctttaatatctttcttttgttttttagttacgtgtgtgtaaatttccatagcagtcttagaagttttgtgcccgagaacgtactgaacatcttttggagtaattctttcattaccgtcataaagtagtgtagcaagagtatgacgcagcccgtgaggggttatcttacgtaaaggctcttttttatcgttgggatgttccttattccatttttcgcattgctttttgtcaaacttatacaagtacttcaaccaaaagtcaggctgctgtgcccaattgtagctaccgtctttggtgtgaaaaatccattcacagtggtcaccgatttcatcgcaatattcgcggtattctttcagaatcatataaagattgtctgacatagggactgcatggtgaactccatttttaacgtcatcaatggtctttttgccgttatcatctttggcgacagttcgctcaatttttacaactcgtttgtcaaagtctacatctgaccatttgagtgcaagagcttcaccacgacggcatccaagagatgcaactgtgagaaaataagtatatttcatgcggctataatcacgggctatatcaagaaaatgtttgagttcgtccaattcgtagaaattacgtgaattatctcgactagattttgctgactttttgggcatgattacgaagtcaaaagggtctttactgcaccagtgacggaagatagcatatttgataattctgtgtaactgattgacaattgacttgtaagttacatattttgaagcaagatcattaacatatttttgtacatgatccggtgatatcctgtctatgtaagtatcaccaaattctggctcagtatgatttttccatgtgtcctttaagcgtcctagtgtggaaccacgcacatcttgcttcattacttcaagccatacattatatacatagcttacagttatcttcttttgagctgtttctatcttttgacttaatgcacttggtccttgtgcctttaaattgcgacgaagttcctcggcttctttgcgggatttgagtttgcttctggtaacgtttataactttaccagtttcaggattaataccgatgtaagtcctaagtcgaaaatactttttcccgttttttaatttatactctgtaatttcagggtcttttttacgagccataatatcattcctttctaaaaatatttgatgatgcgcgctcggcacgagcgcgcatggggcgcccgcgggttagattatctcttgttgatttcatgaatcaaaagaagtaatattattaatgtcaagtttaattcgttcatgtttttcacctccaaggtggagaacaacacaagcttgcttgtgttagacttggaaggtgacaaaacatgagtgagcgggcgccccaagagctttactcaaagggatgcaccgtataagaagcgttgctgtgtcggcaatgcttcttttttgctataatgaattaaaaaaggtggtaacagtatgaacgataatgatttctttgtagtcagttacaaaattcttagctatttaaaatattgctatgaaaatgataagagagtagatccaactattttgagtgaagggatgctctcaatttcaaacaatcaattcttgaaaacactaaaaatgttaattgatcaagggtatattgacggtgtgtatgtaaagcaaactcttgatgggatgttcgttttaaacaatcgtagtaaggcagcaattactatgagtggtttagattatttgaaaaatgatcgctctatgaaagaagcatttgaacaattgggaccagtacaaaagtggttgccaatcatcaaataatttaaactgatgttctttaataccgtaaaatcaaagcctacacacctgaaagggtggcaggcttatttttatgcgtttctaaaccatctagtagatgatcctttgacaatatgagtgcctcgacctaagtcgcctcttacttcgtaataatgattattgccgaaatatctaacatcgacgtaggatcctttggcaagccagaagctaaacttaggtgctttataaagcggatatcttaacttatatacttttacgtctttggttgttttaacttcatgccaatgccacgaatgtttactgatagcttgcacgggttgtgccgtaactgctgagactgcacctgtaccaccgagcaacatgatagatgccattgctgtaactaaaaatctatgtttcatatatctatatcctccaaaatagatattgccttaggtttatagtcgctggcgttgtggactttgatataatgaatgaaaaggagataggcaaatgaaagatgacattgaaactattaaattatatgtaaaaatcatattttacgaagtcaccatcatgtttggctggtggttgtggaatattctgggaatattgccatttcactgattccagcctaactcgtgacttaaccatgctataattaatgggataactattaatgtaatcacacttcaaaagatttttttgattttgccgttaatctttgaagtgtgtttttttatataatcttgacctttatcagtaatgtaatagccggtaatagcagggtgaccgccaacgaatccctcattgatgtctactaagccttgctttttaagttttaacaccatcattacttcatcattattgccattaagtgcagcaaaagcatctttattttttagctggtgcacctcaccatcactgatagacttcaaaaattctaaaatgtcgttcatatatttcacatcctttccagccgcgcgtgcggctttttctaatattccgacagcccaccatgaggcgggttgtttttgtcgtaatttataactaagttgaatatcttgaaatcgttgtctaaaacgttgaatacgtcttgcttgtttccagattcttccgcacttagtaatgctaaacctattcgatcatcacaggcgaaaagctcgggcgactcaacatttttcaaagcttcctcagcttcactttctgtgtagtcaagatagttagttaagattcttatagtagatttatcttcaatctgctcatataaacgagcaataaggtaagttaagtatctaggtgtgtaatcatcatgcatatttatgtctccttaactatgcaatatcagcaagtaggtaataacattccttgggaattgcaaaacttctagcaaactgataaatgctggtgaagtggaattcattttcaatgcaatactgttgcaataacttgatagcaaagaagttttcttgcgcttcacctttacgattagttatgtcgttcaaattaaagtatgattcttcctcgtgtagtacatgtccgatttcatgagccagcaaaaaaggagtgtgagtaggaaaaggccatctagaattcataattattaatctgccaggttcgttatagctaactgatggagcatagggcggtaatttataagtaaactcgataccaatgtgatgatcaaaagcgtaattcattagataccgcatcaatctgtcatagtttgagcgtgtctctaatgacatttcttctatattagtcatagaatcactcatccttatttagcatttcagggtgacgcttgaagtagccctttgctatatccgcataagtgctttttaattcgtcaggtaatttgccaccgtagggcatcggcatgtccagatctgaccatgtgagagcagtgccatcttttgctgtgctttctgaactaggattatctgattttccagttaagtagtcagttgtagtttcaaataatgctgctatttgattaagcatttcataatcaggctcatgcagatcatattcccagttagagtatcgttgtgcactaacaccaagcatttgagcagttttagatttactccatccttttgagtctcttaaattctttattcgttggctaaaagtactcatatcttgcctcctatgtttcaataattaatttaattgtagtctcaattaaagaagtagtgtatatttttaaaaaatatctgtaaaaaagtattgcattttaaatttatggtgttagtataaatatgtaatcaatttacagagaaaatttaaaagtgaggtgataaagtggacgtagttagaaaagatgctggaaagatctttgaacaacttgtggcttcaaaaggaattaaaaagaccttcattgcttctaagatgggaatctctcctcagtatctaaataacattattcattttggaggatttaatgcagactttgcttttaaagctgccaaagtgctagatgttaatcctagtatttttttgaccaaaagttacagagaaaatttaaaaatcaaatagaaggtgacaagaatgaatcaattaacattattcaactttgaaaattcacaacttagagttgtgaaaattgacggtgagccatggtttgtcggtaaagatgttgctcaaattcttggatattctcaaccaagtgttgcagtttctaagaatgtgcctaccaaggataaaggtattactgaaatggaaacccctggaggaaagcaaaaagtgacaataatcagtgagccggggatgtacaagttgatctttaaatctcatgcttcaaatgctgaaagatttaatgactacgtagcaaccgaagttcttccagccattcgtaagcacggagcttatatgacggatgaaaaagcgttcgatgttgtccacaacaaagatggcttagcaagtttgttacagcaggccgcagatcagctaagagagaaggacattcaaattgaagaaatgaagcctaaagccttgtttgctgatgcggttacttcaagtaaatcaacagtgttgattggtgatctcgctaagatgattaagcaaaatggtgttcatcatcttcaaattgtcgaaaacggcacaaccaagacactaagcatggggcctaacaacttgttcaagtggatgcgtgcaaaccattacttgattgctagaaaaggttctgattacaattcaccaacacaaaggtcaatgcttctaggtctgtttgaaattaaagaaaagacgattgtccattcagacggtcatacaactatcagcaagacaccaaaagtaacaggaaaaggccaacagtactttatcaatctatttctaagtggcgaagttgcataaggtgttcgagtttatcaagcaggaaagagagcgatggacatgaagcaagacgaatggaaatcaaagccaatcatagaaataactcagaaagacgtggaaagaatgacactagatgagttaaagagaacccaagttaatttgcttattgaacggttatacgtagctagttatgatgactgatcaaaatatgcctatatgtcaggttgggttgatggtgaattaatcagacgactgggataaaaaaagagagaaaaaatgaaattcagtaaatacaaaaataagccatctcatgaagatgacttagacgaaaagatcgatagatttaataaaaaagcttactgggattatttgattccgtttttcgtaagcctaattactacactgctaacacttgcagcacttaatggaaaataagtggaagcaattttgtagtgattagagttgttgtgattgaaacaaatatcggcaaaaggatgcttttaaagagagtgttccaaaaccttgcccatctccatttgaaaaagtttaagccttcatcggtaactttaaattcagacgggtatggatagcgagaaggcataaattcaacgagctcagcttcaactaaaagtttgaattcataactattaacttcttggtgagaagtttcatcaatactaatttgattcagcggtgctgctttttgtattttgatgtatttctttaataattttctctcggctggcaaagtctcgtatttatgcataatcattctcctaacattaaagattcgatatttatttcattgtatcaaaaggaggagtgagcaaaatgacagaagacaagatttttgatgaatttaaccaattgattaaggacttaaccgacgacttgatcagagatacagatgatccatattcggattcagttgatacagctttgacaaaagtaattagtgcaagaagaagctataaatggaaaaaagccaacgatcaaagaatcgctgacttcaaaaaacagaatcctaatgaggatcccggaaatgcaaaagtagaaatttcgtctgaatattgatgagattaaaaaatatctcgatcaactttcatgtcagtataggcatctgaattgatgcggaagttctttctcaattcacagacaaagaatgaatcattcttatctaaaactgatgaaaagcactctctaatttttgcaggactaagagtagtttttaccagccaaacagatttttgaatttcaacattgtcgttgccagaaattgtagaaattacttcctgaacattttcatacttttgcccaggtttcattagatcgtaggcaataacatatgatgccatgatatcccctccttattagaggatgacttaattttagcagaaagaaggaatagcaatgcaagaactaattaaagttacggttcaaaatgatcgacaacttgttagtgcaagagacttacatgaaggtctgggacttaaaaagagatttacagactggtggaagcaaaacagtaaagactttgagaaaaatgttgattatacatattcacctaaaggtgcacatgttggaaatggcggtataaggcagattgatgactacgccttgacaatcgacatggcaaaacagctttgcttgatgagccgcactgaaaaaggcaagcagtaccgcaagtatttgatcgaagttgaacgcaagtggaatgatccacaagagattgtcaaacgtggatatgcaattctgcaaaacgaaaacacgcaactgaaattggagaacaagaacttaactgtctaattggaggaatccaataaaaaggctagttacttagatgtgattcttggagcgccagacacactagcagttacgcaaattgcggcggattacggttataacgccaaggattttaacaaactgcttcataaagctaggattcagcacaagattaacggtcaatggattctatataaggtttacatgggtcaaggctatgtaacaactaagccgtttacctttatagatcataaaggcagaaccagatcaaagccatcaacgtattggacgcaaaaaggcagaaagctgatttatgacattttaaaagataacgatgttttgcccttgattgaaagcagtgacatcgaataaggaggggctgagatgaacaaagacaagattttcactgaacaacaaattgaagtaattaaagaaattgttagagatgaaatcaaaaaagctgacaagcagcgcttatcagctttgggtcaagaacttaactttaatcctgatgattattaataaactcagtgcttttatcagttagtttaagccaagtgaatccacaatcggtgcaacgaattgaatttacgtacagtgatccgccaataagattgtcttttctcattacaactaaggcaaaagttgttggacctttgccaattgcaatcggcttaacatttactgattggcattcaggacaatgcagtttattcattaaaatcagctcctttattggagatgactcaattgtaacagaaagcaggtgaggtatatggctcttctgagcattaacgaagaagaattagaaagatttattgctaagcgagttcgtgaaggtgtcagagaagagctagcaaagcgcggagaaattaccgatcaaaaaatgttcagccgcaaagatgcatatcactatcttggtgtaagtggctcgtactttgataacgcggtaaagcggggatttatcaatccgagcctgccaggtgacggcagaacgagatattacttgcgcgaagacctggataggttcgcggaagacgggaaagactatttaaagaaagcaagactttaaggagaaaaagaaatgaacaaagatactgaattttcaaaagaaaagatggccaagcaagttgcaaagttgtttagcaaggttgatgaagacagcgcaattattatgtgcgtcgcaaatggaagcaatttaagtgaattagaatatggcaatccgttcgttttaggggggtaatccagcatctaactgacgaaatgcgtgagcagattgaaaaactgcctaagtatgaagccgctccattgatgatggacgctctaatgaaaggattaaaagggctacaagatgactaaaaaggaatatgaaagagaatacggcaagacaaagcttgaccacgtgctaagccatatgaccattgcattcggtaaaatcctggaattcatggcaattctatttttaccatttgcaattgtagagcagctatgcatctacggcgtaacgcatcccgaccaaatcatttcactgctgctagtcttgatgatcattctcacagcgctgtcggtgcgtgccgttaaaaagctaagaaagaagtgatgacaatgcaggctaaactttttggtaagcggttgatgcgtgctagaaaaaataggcaacttacacaagtgcagctggctgaaaggattggcgcaagtacaacgactatcagccggtatgaaaatggtttgtcttttcccagcaagagaagacttagcgagattgctcattttctgggcgtaaaagttgactggctattaacaggatttaaggaggactaatgaagttatggtacaagttcatcaattcggtgtggcgtatcaacgagccggtaagtacagcgagagccagcttatccttatggctaacagtaacgctattagcggcgttagcggttctgattttgcgactatgccagtagaagttaaaaagattttaggtattaaaaaagcactcattgagtagcagtcaatgagtaccagacaaaataaatcaaactaaaggaagtataacacatggatacatataagttaagagacattggtgcaactgttaacacctttggagacgaatatcacacgttcagtgatgttctaaacgacatgattaagattgaccctagattggatattagcgacgtacaggacctcgtagacacactaggggggtataaagatttcgaagaaagcgcaaaagagctttgcatgaaaaaactcaatggcgtggacgaggacgaagaagaccccgaagccgaatggggcgacggcatgtatgaccgtgccgcaggaaagtaggtggcagttatgcatgatgcacaagagtggctagacgggatcatcgaagatatccctaatatccgcaaagagatgctggacgactgtcgcactatgaagacctatggtaaggcaaaacagtacgctaaacagttcaaaattgactttgagggtaattataaggctacggcagaagaacaagcacagagcttatttaacggccttatagaggacgtagtaacagaactcaatcgagaatccgacagaggagagattaaacatgactgaggcagagaaatttgcagagatgaccaaggatgaactaattaagattcttgatcggttgcaagatgaaaagaaagaacaagccaaaaaagacaacgctagcgtttatgagcgtctttcaaaggtagatgtttctaagtttgttgataaaaagaatggtcttaattatctaagctgggcgaaagcctgggggctggtaaagagtatttttcccgatgctagttataagttacgggaatacccatattacacacaaacagcagacggtaattatcagcagattggcacccatgattatcttcgtactgagtacggtgttgaggttgaagctagcgtaactattaaaggcgagacatatagttcaaagctttatgtcatggactttcacaatagagcgcttgaccctaaaaaggtcacttactttgaaattaataaaacgcaaatgagggcgttaaccaaggcgttagcatttgcggggctgggtttgaacatttacgctggtgaagatttaccaagtagtgacgaaaagacgccacaacgcaaagaaagagtgaccgagcaagaactaattgaaaaagcaagaaagagcaaaactcagtacggtggtggcaatgaattagttaccgacattgtgggacttgaaatcgatggagacaagcaagcaaatgcttttttaaaccagtggtgtgaaaaagatcagaagaacaaaaatttatataaattcattattaagaatcagttagctacacacggtatgaaggtaggagcataaatatgagtgaaaaacaagtatttgaaggttcaagagctttcttgatgattccaccagctattgcaagagataaagagcttttaaaaaagccaaaaacaattattttgatgggtgaaattatctcaatgctcaatgttaccggcgaattttttatgagtaacaagaaaatagctgaaaagcttgatgtatcagcccgtaccgttaacgaatatttaggaatcttagagtcaaaaaagttaattgaaagaactaagataattagtcaagaaaacggcgcaattgtgggtagacaaatacgtgctggcgtagacctagtgaagcgggcttcactagggtggggaaatacgcttcatgggggtagtgaaacccacttcacccccctagtgaagcccacttcacataaatataacagtaataatagaacaactaatagaacagtagaagatacatatagttctgctgacgcagaaccacctatcccttacaaagaaattattgattatctcaataaaaaaactaatcagcatctacgctatcaaaccaaagcttatcagaaattaattagacaacggtttgaggaaggtgcaacgctagaagacttcaaaaaagccattgataatcaggcatatgcatggcaaggaacgaggttctggaaatatatgcgaccatctacactatttcaagcatctaagtttgattcttatgtgaatgctaatgacttaaatcaagcgaaacagccgtctaatggcggctacggtggcgagccaaatataagtgacattccagacgatgatttaccgttttaaaggtggtgataatgatgcaaggactagaaggaattgcaattaaaacagaaaaagcagaccaagtatgtccaattcataaaactcaaatggtgctagaccgcaaaggcaagtcattttgtattgaatgtatgaaagaacaaactgaaaaagaaaagaatgaccaagttaaacgctttatgcatgacaaggtcactaagattttacgtactagaagcttggtagatagaccagaggacttagaaaagtctttggaaaattacacggctaaaaaaggatcacaagaggcttcaatgggtaatgctgcttataaaattgcccatgaactaattgataaccctgataaagcgatgacaacgttgatgtatggcacgccaggcgagggaaagagccatttagcaatgtcaatccttaatatcgtaaatgctaaaagcaatccaccgcagacctgcttatttatagatgttagtaagatgtttgacatgatttatgaatctatggaagatccaacgagctggtggactaaaaagaatgttattaactttttaggtagtgtaaatgttctagttattgatgatctaggcagtgaatcgtctatgcgacagaatgaggcaacggaagcgacagaatttaagcaggacgtattaaaacagattcttgataagcaaaagagactaatcgtgacaactaatttgacactgtcacagttgcaacaagcatataaccctaaaattgttagtcgcttgttatcggattcacgtggtagacgtttagattttacaggaatttcagataaaagattggagctataacacatgattaaaattgttgaaaagtcagaaaaaaacgacttattggaattaaatgttaatgacacaatttgctgttggaatgatgatgcgtccgttgataagaactatttaatggtcacgaaattaaatgactatgaagacttagaaaagccttatacactcattgcacttaatgccactcatgagcaatgtagggcaactaatgaaaacgacgtgctagataaatatttttattcaaatcttgacgatttagcccgagatatagcgaacaactgcgatcatataaaaaaggtggatctagtggcaacagcaaaggagcataacgatgacgaagattaaggtagtacagccaccatgtgagtactgtgactttaaaaacatgaatcgagccgcatatgcatttagagaaaagaatggcaggtttggtggcttcttgtcgctaaataatgatggatcctttgacatcaatcgagggatgtataagacagaaaagaaaccgaatttttgcccgaattgcggtagagatttaaggaaagacgctacacaagataaagataagtaattgagaggatagacaaaatgagtaaatttaacgaagccagagccaaaaacattgaagatttaaaaaaggtcgttaagggagaataacgatgaatgacttactagctatgtgccgtatgctaaggttatcggcttgatgcccccgggtattaatttcacaaatcgacaagaattgtttgatttgctgacagagatgaaggtgaagatttatgaactgtaaaagattaaccggacatggacaagatgaaatgatgttccattgtgatagttgcggagtaaatatatcgatagacacttacgatgttttaacggcagaagacaacttgcattgtcctctttgtggcgcaagcgccggtcatttatccgtctatatgtttgatgaaaagaaactaaagaaaattgatggcgactttaatgtgaaaattgaaggggataggatttgcatttatctttgtgcagttcgcttatatgaattatatggcgaggataacatggctatttatagcgtttatttaaaagtggagaaaatggctaagactgtggaggcaattttggacttttcacggaaattggatcatttaaaggagctatacaaaaatgaaactatttaatgacttgaaaaagctgtattgcagtccggacgaactagaagtaggcgacttcctctattgctggataactaacacccattatcgtgttttgagtgttaacggatcaagctacgtgactattgagtgcgttgagaccggatggacaacaccagtagtgcccacaattgataacgcattagaagatattttggctcacaatgcagactttgacctaaagcatttgacaaaagttaaacctaacgaagtttacatgatttttagcagaaagtgagggattacatggcagtagtaaacgaagtaatgacaataattaatgtgattatgtcatttgcattagtgattttaatttttatctccatacgtcagaatataagattctcacgtgcaaccaatgcaagccttgacattctgtttaaaaggcaacagctcctgtcggaagacttggatcagcttcaaaaagcattaattcaagtccagaaaggtgaagtagctaacgctaaatctatcaatgccatagcaaggcaaatgactgagttgcatgaccttgttattgaagatcagacaagacaagaccaggacatcaaggcgctggcaacgcttataagcggcttgaaaacgtccagctatcgaagcagaaatgataagcattttaacaatgctttaaagaggattgcaaagctggtgaaagaatgacggttaattgcatcaagtttgtaatacctggtgagccacaaagcaaggaacgcccgcggacagttcgtagagctggcggtgttagaacttatacaccagcaaaaacgcaccgatatgaggatattgtgagatattttgcagtttacgccagaaaagaacacaagataagtgagccaatcaactcacagtgtggcgtgtccataaaagcctatttcggtatccctaagagcttttctaaaaagcgtagggaattatgcttaaaaggcaaagaacgccccacaaagaagccagatagcgacaacatcgcaaaaataatctttgatgggatgaacccaaagatgaaattaaacaaagcgctacacaaaaaaatggtgctgcaagatggattttatgaagacgataaattaattgttacgcatagcgtggagaaatggtattcaatgcatccccatgttgaggtaacagttacatgggaagattaatggcggagtgatatacgaatggcagatagagcagagcaaatgacgctagatgataatttagaggttgattcaaaggcaaccgcaaacaacgtgaggaattttcttacatttaaatttgaacattttcaaaattatgcaggtttaaatgtttctgatctgtctgttattgatgattcacacctatctagccccaaaatggacgcgtcaggcgtttcttcacatggtgggataaatcatactgagtcaagttttaaccgcatcatggaagcagaacaagcatgtaaagcaatctataaaactataaaaaattgtagaaatggcggcagaactccatatcaaaaaatcttgtctgaggcttacttgcaaaacatggaagattacaagattcagcaggaactaggctatgaagatagtcagtactacatcaaaaagcgccaagctttgtgtgaatttgctgacagattcgaaaaatggaaagactggtatagcatcccctactttaaagatcttcacatttaccgaaaaaataaaaacggagtttaaacggacttttatcggagtacaagcggagtgaaatggctatattatagtattgtcgaaaatttaggaagcagggttttcgatgaagtgtaggtacaatgacaatttgtttttctgttacgagtcttaataaaccatatatttattaaaaaactccaattaaccagtaacggcggctggcgccctagaccaggttcgattcctgatgctgttgtagcccgtttattcgggcggaatggcaattctaattccatatcccaaattttataatcactttgcctcattcgaggcattatgagctagcattcggtgtaatgccacatacgttttatataattgcctggtgtggtgaggttcaactcctcactagctcttagccggcgtggaaaaccggcactaagtataataatcatatttattaattgcataagtaataaattgaattttactcgtctagtttgggactgtgtcccagaggtcaaagcagtagtgttgaggcacgttaaatttaagtcattaacaatttcaacttggtgcttttgagtttttaacttgaaaatgttgcaagcaccaagaaccatagatatggtatatcactgaccaagttggtcacgtgtgggggttggattccctcactgcttatatgaggaagcgtgtgtataaacctatgacagggttcacgccattcaatctataaatcgacagcgacgttctgccgggataccgacggaatttcagacaagccaaagggtaatagctttggttgacctacaccgaaaaggaaataggtgtcgttggttgagtgagaaagcattaaattattgataaagtaggcaacaatgtcagcagaattacaattgccggcggagatttaggcgctccgtgtaaagcagtctcacgctaatctggcagacatgtcagggaaccacgagataaatgtaagttaaaattctggtccacgatgatccgcagaaatgcgggtataactgatacgtgccgtacgagtagcccaaaacgtggaaattacaatacaggtttttgcataaccatcaatcgcattgttgggtgaaagttggaggataaatcctcaccaagatttaaattaagcaagagatataaggtcgctccttatattgcgacttgcttaaacttgtgactgaataatcaacgatttaacaagttcaagtggttaatagccacccgcataactaggaatatagccaaaacggtaaggcaacgggctttggtcccgtaatttgttggttcgagtccagctattcctatcgtcggttcgaagctagcgacgtataaaataaagcaattatgtgaggcaataaccggtcttacataaatggttaagttagtcacgcacaggcgtgcaaatggtttgttagtccagaggtctagggcaccgcactgtctatgcggaaacgtcggttcgatttcggcacagaccgttgaggttagttctgtgaacaaagtcggtggaggacgtctgcattccgacataaagcagagaagactaagagtcacggaatcgtaaaagaggaaaagcttaatgcaagcatcttgcctcatttgatcaggtagggagttagctcagatggtagagcgttgcaaggatcgtgggttcgagccccacactccctattgggctgcaaaagctcaaatatatgctctttttgaagttcaaaatttattcatttctaacccttctaactgttatccatatagttagaaaactacagtcgtactgtggcttttagactcattgctaagcggcaagcggctggtctccaaaaccagtaatctaggttcgaatcctagtgagtctgtttcaatttaataagcatttaagacattccacgctatgtgtgatgtctttttttgtttccagggagtaaaaatgtatcacaaaaaaccagataagccagacaaatcgctagccaagtgggttgaagaaaagaacagcaaggctacaccaaaaagaagcggtttttggcacgaatcgaaatatcgcccaccagaggacgacatcaaagaagctgaaatcaagcaagatgaaccagaattaatcattcctataccgaaatcagtagtaccaagtattgaggactacgaaagcacgtttttgcataaggaggatcaagaaagtatgcaaaataagacattagtcagcaagttaactgatgaaagacaacacttacaagatgatttattaaagattgataacaagattatcaatccgctaggcgtgtcagactatcaggttaaattgtggaagatccagcgtaatgcgatgatgaccgtggtcaacgtcttagacatgcgtatcagcgatttaagcgtggagggcgattaattgaccccagaaaagtattacgagcttagaaagcattataagctggtcaaagaagctgaacatttagttaagtacaataccagcaacaaggtagtagacatgattaaatttgtggcgtttaaacaaaaagcgggcatgatgccacaagagtacatagaaaagtatggagattcatggaaggactaagacacccgctgacacaagaaaataagaccataggtgaggccgtggcacataaacatagaagataccgcggcgttaaaaatccgcttagagggtcattattagagcgcagaatacaacgcgccatttattgtgttgaaaatgacgtagataaagaatttattgattggtttgtcgctgatacagggatgcaaccacaagaattcttagacaaatggagtaaaaaattaggcatatgaaaaatatgacaaaagacaatatggagacaaatcctcgctttaaaaaggctgtttttgtaaatcattacatgagtgaagaggatattaattacttgcttcccaagtaagttaaaaataagttaggagatcaattaatggtggaagaaacgactcgtttagcagaaaaacaggtgcatccctgaattaaagctttttggctctggcgaaactacgatcatataacaaataaaggctattcacctcccgtaattaagtgaggaggtgaatagccttgtcagaaattattcttactttgatcattatacttctgataattgttgcgatcaagtcgtaacgccagagccaagggcgctcgcccttgtgcggtcgagcgccgctaataatataaaagtattgaattgaatataaatatgcgttgctgagagatgacgcttattttttatgcaaaaaatcttttcaattataaaaagttagatggaaacattactcaattcctaatttagctttaataccatctgctaggatggctgaaaaattaagacctgcctctttaccttcttcatttaaatagttagggatggttaaggtctttttgactacacggttatcattttttcgcttatattccgaaatattaacagtaaccaaagtagcaatttcattgtttttggttttaggaattttagcatttgattcaggtaaatcttctaccagtgacatggttccgattaaatctttccccatatcaattgcttctgcaatagttcttccttgggtatcacggtcaaggtctggaacattgaccgtatatttgattttagggtcatcagttggagttataacgattggaaatacaacaattttatcttttttcataattaacaatttaagatggtacacgaataagggggtattgccccttattttaccctttaagattatttcgcttcataatcttttcccaagtgactttgttaagatcaccgtggcgaggaattgattctgaatgatgaccgttggtataaatatcatgattatgaccatgacggtcgaaccaccagccattttcctttaaaactttaagggcatctcttctttttaccatcttacttctcctttcacatattataatacacgtgtttaatacgtatgtcaatataaaatgcagattagtttaatttttttaggaggtgaagctagttttggcagagcagaagttaacaattaaacaaaagaagttcgccgatgaatatgtcaagactggcaacgccacagatgccgctattaaggcaggatacagcgaaaaatatgctcacaccaatgctaataaattactacaaaatactacaatcaaagcccgtattgacgctcaaatgcaaaagctcgaagacgacaagattatgaaggctgatgaagctttgaaactgattaccgcaattgcacgtggtgaagagactacgacggttgagacaaaagacggtttttggttgaccgtacacccaactatcacagagaagcaacgtgctagtgaagccatcttgaagcgctatccattatctgatatggataaagcccagattaagaaggcacaggcagaagccattaaggcgcaggctgaggcacaggtagcaaaggcaaaagccgaacaactccatacggttgctgacaagacccgtgagaagatggacaagctaagcactgaggagttacgcaacttagccaagttagcaggtgaaaaagatgattaagctgacagccgccgaaaagaacggaattgcattagcggcaaaggaatcacttgcgcgtagaagttacagtgattactttctgctggctaatcccagcatgcggatgtatccacatacaaagctgatcaccgagaaactgcaaaagatagcagacggtgaacagcatttttacataatttctatgccgccacagcatggaaagagcttaactataacgaaaacttttccaagttattatttaatgaaatatccagacaagcacgccatgatagtcgcttactcacaagacttatatagtcagtttgcggcaagcaacaggcgtgctttttctgattggtcaggggcgctattcggattaaagacaggcaagaacacagctcagacatttactgtacaagaccacagaggtggtttctatgctacttctgtgcttggtggtgctactggtatgagtgccgatttgctggttattgacgaccccgtaaaaaacgcagaagaagcgcattccatgaccgtcaaggacaagatatgggacgaatggaatttgacgttttacccacgtctgcaaaaaggtggctcggttatcgtgatcatgaccaggtggcaaacagacgatctagccgggcgcttattgtctgaatcatccctaccgtgggaagaagtcaaactgccggctatcgcagaagacattccagccggaacaactgatgcaattggacgcaagaacggtgaagccctgtgtccgcagctgcacacgctcgatgaattgcttacccacaagcatgatatggggacggtcaagtttaccgcactgtatcagcagagcccaattattgagggcggtaacatcttcaaagatgagtgggtcaagtactacgtggacagcagagaaacgcaggcaaggctaggattaaccgataaagatgcggtgattctaccacatcacttagaccaaaccgtacaagcatgggatgcaacttttaagagtaaggctaatgacgactttgtagccggtcaagtttggtcacgccgtggtgccaattgctacctgcgccctaactggtgccacaagcgtttaagctttactgagacgctagacgctattagagccatgtcccgcatgtatcctgacgctactgtaaagctagtggaggacaaggcaaacggtccggcaatcattgacacgcttagacgtgagattccaggaattatgccggtgtcaccaggcgcagacagcaaggaagcacgtgcggcgtcagtgtctccaatgtgggaagctggacaggtttatataccgcatcctgcatggcacccagaagttaaagactggattgctgaaattttaggattcccgaacatgccacacgatgataacgtggactcgatggtatacgcattaagacgacttaacacgaagtttggtggtccaattgttagatactaggaaaggaggatgtcaatggccaaaaagaaaataaggcacttcaaaacgccagttgtgcggtctgattcgcttgacctaagtcctacggttgactatgaatcaattgcatggaagacagttaatcactcacaggactatgaagccttagacgaccgatacaagtatgatgctatcgctcataaaatggtctcaaaggtcgcagaagacgccacaagaaacggattccgtttagtcattccaggcaaaccagacttacaagagatgtatcagaatcgcttaaatgatttgaaaacgcaacaggttttgtctcagcaaatcatctatcaacgcaaacacggagatggctatataacctacctagttaaagagacaaatccaacgagtacatttgaccctcttgaccctgaaaacatcgagaatgtggtagcattgcacgcattcggtcaaaagaatgtacaaagctatctaaccgacgatgatccaacgagtgacgactacggcaaagagtcaaaattgaagattcaaccaaaacaagccgccaccacattagacaggtacggtaatccaacacaagaaaccaaggacgaaaatgcgattgttcttgatgctaccaggtatagtcacatcagcttagacaagtttgacgatgaccaaacagggacatcaattatcaagcgctgtgaaaagcaactcaataatatggcgattgctaccgaatcagtgggtaaaatgctacgagaatttacgtttaaggtcttccaatctgataggctgattaatgaaccattagaccagttcagacgcgacagatacgaattagcacgcatagcaaacaccgaagctatgatgtttactggtaacgatgacaccgtgaccaagctagcaacgccaactggtggcatgaatgtcttacttgattacttgtggcaagacctttcaacagcgtcaaacatccctaaatcggttttgacgggtgaacagtctggcacgctggcaggcgcagggcaagacgtgcaaaactattatgacagtgtgaaagccttacaagagcagattttgaagcccgaaatcatgaatattgtccgcttgttgatgtattcgaaagaatttggcggttacttagacccagacagcttagaatggcacattgagtttaatccgctatggacaccggacgacaagacgcaaagtgagacactggtcaaccatgcaaatgcggccggaacactggtcacaaacggtatttttgcccctgatgaagtccgcaacatgttcaacgggcaaggcaacaacgcaattcaagggatgcagaacaacgcaaacgtgactgacagcgccgacaatatcgaagctcgatatacgcaagagcaaattgaccagtactacaaagacttagaaaaggcgcatcccgatggctaggcgacgaaatgggtatccattaaaaattgaacggtcgtactatcgggatatgtctaaactcattcgagagtggcaaaaaatcgccctcagagcggttgacgtgcatttacggcattatcttattaacggcactaaaatgctcacagatgcggataattcacgtcaaccagattggacaaattacgtacagcaaaccttaaatttgatgtcggtcaatatggaaaatcccgtcactgaccagattctgcatgatatgacaatgcgttttgtctatgcagtaagccagtttagcgctaataagacgcgtacacatcaagtagcaattcaggctaagatgggaccatatgcgcttaatccgctaagagataacgcaaaattgcgtgagtacacatggggcaagattctggaaaacacccaattaatcaaaaccatgcaagggcgctatatcgatcagttgaaaggcgacatttaccgaactatcaatgatggcggcggtcttactgatatcacacatgctatcagcaaccgtacagggatgactttgcgacatgctgacttaatagcaaccgaccagacaggcaagatactagctcagattgacgcatatagaaaccaacaagcaggctcaacgcgatatatttggcgctcaatggaggacaaacgggtaagaccgaagcacagggaattagacggcaaagaatttaagtatggtgaccccaacggcggggacaatggtcaactacctggtgaaccgataaggtgcaggtgttacgctgacccaattgactaaaattaaatgaaacacaaacgcttcctcaatgcgagggagcgctttttttatgcccaaaattagcaaactttgtgaatttttttggtattccgcccgtgggtgaatctcatttaagcccgttaaatcaacattcttactttgtgaaatttcaggaggattttatggcagattcaaacgaaattaaaccagttttaaccaatttaaccaatgcagaaactaagcaagcaattaatgctttgaagcctaaaagcgtggaggtagctccaaaggtagaaaagccaattgaagttgtcaaaccaacaccagtagcaaaggaggtgaagccaatggcagaagtaaaagaccctagagggatgttcgattatacaggctgcgaacagtacaccgtgcaagatggcgaaacattgtttgatgttgctcaaaagtacaaggtcgctttgcaacagttgcgttatttcaaccatgtaccaaaggacaccatgcgagttaagcctaggcaaacactgtacatccccaaagaaccggtattagtgccagtaggcgaatagcatgaacctgacacggtacgatacagcgacgattaacaagttttctgctgattcacaaacaggattcttgcatgtaagcaatgtgccaatcgcacgtgtgggcgtttttccttatatcggtaaaagtgggcagatcaccatggaagccaaacttcctgatgatttattgactgattcggctgttgagagtgcaaattcaaagccagttacagacgatcacccacaagaatcggtgaacgtgaccaatgcgaaccgatatatgaagggattaaccgccaataatgcccatgttgatggtgacaagctgaaagttgacatgactatcaccgattcggcattaatcaaagaaattcagggcggcaagcaagagctttcaattggatttcaaactgatgtggtacccgttaaaggtactttcaagggtatggcgtacgattcggcacaaaagaacattcaaattaatcacgtcgcagtagttaaacgtggtcgtgctggtcattcggtgagattaaccggtgacagtgcagaaatggttatagatgattcacaagagaaaggaacatcaatggaaactacaaaaattcgtttagatggtgcagatgtcacagtcgcaaccacagacgcagaaagaattttaaagcttgatgctgacaacaaggctaataactcaaaaattgccaaacttgacgctcaaattaaggctttgacagccgaacgcgacaagttaaagggtggtgctgatgctaacaagaaatcacttgatgaagcacaagccaaggctgattctcttgaaaaggaattagccgcagaaaagaaaaagtttgaaggggatgcactagatcaagcaatcgctgaccgtatggcacttatcgatgaagtaaagccatatgttggcgattcttttgattttaaaggcaaatctccgaaagaaatgaagctagaagctatcagcaagactgattcagtcgatttaagcgctaagtcagatgactatattgacgcttattttgactcaatcaagaaccgcaataactctggcgtagttggttacacgggtattgaaaccaatgtcaagacagacagcgtagacaataaacccgcaaaagaccgctaccacttagcctaaggaggtaattaaatggcaattccagatggagaactttacaacaccggtgaacttgcaccaggtcaattagcaaccattgaacgcgcaacaatcaacaccgaacaagcaggagcaccaatcggcttcggtcaaggtgtcgcaattaaagatggtttggtagttccagcaaccggcggaaatattttcggcgtggctttacgcagaacttacttaaacgctgactacttaacacaagaaaacattgatgctgacaagtggcaaaccggtgaattatttggcgtagttcgtgagggaactattcaagtaccaattaatgaagatgtaaatgaaaacgagaatgcagccgttgataaggacggcaatttcaagccagcaggcgctaacgacacagtcgttggcgtctttttaggttccggcaataaaggcggtaccgcacgcatgcaaacccgtatccagctttctaacacttctgttacaggctcaggtttgcaaaatgctaacgcgccacaagttgaccaacctagcacaccagcagttaaccaaaagccagcatccctatcaacgggttcaacaactggcacagacaacaagaacggaggtaaataatggcgaataaggactatttaacgcgtgaacagcttacctatgttgacaacgttattaagaccccaaaggaacaagaattaacagctatgtctcttttccatacttttagcgttccagcatggactaagcaaaccacatacaaggtaatgactaccgccggtcaagccgcacattacgttgacggtgccgacgatattccagtagttgacatgaatgtaaccgaatcagcatccaacttgaccgatattgcgattgcggttagatactcacgtcaacaacttggtgaagctcaacaagtaggcatggacatcttaacgccaatggcaacaagagcccgtagagcgctagcagaagccgaaaacaagcttatttttaatgggcttcataattcaaacccagcacttaacattaatggcttgactgacccagtttctaagttgggcgtgcaagaatcaaccgcaccggttacatttgatgcacttgctgacgacccagacaacaacttaaagattagaaattggcttaaagacgcccaaagcaagattacacacttagctggctattcaaacgctcaaccaattttagcgttgccacaaagcgcaattgaccagcttgatatgccttacaaccaatacaatccacaaatgactgtattgcaaatgattagaccatggttcaaggacattaaggcggttcctgaacttgaacaccaaaactttgggtctaacggcaacaagcaagatatgggttatatcttcttgaatgacgcggacattgtacaaattccagtggctcaacaaatacaacaattgcaacaagaataccactcaggacgtaccacaattccttacactgaacgtcttggtggtcttgtaatgtactacccacacgcatttgtacaattgcacggtatcaacgatccaaagaaagcctagttcggaggtagcctatggacgatttacaagacatgcttaatgctgtgaagcaattaagcccagatttaacttctaaactgtctgatgatgcactaaatgggctattgactaatgcttatcaaatagcaatggctgatggttttccaaagcttgccaagaacaacgatggtgagactatcaaagctcgtgacatggctacgcaatacttagccttgcatttaatcacgattaacaaggctatgggcgatggtggggctaatgtcaccagcgaacaagtttcagtgttgaaacgtacttatgctgacgttagcaagttagagctattccagcgctcgccatgggggcagctatatctatggctgtataacctttacggcaacggtagtatttcaagatatggggttgtgcaacactgatggctgatagttttgaagaaatcgaaaataggctagatcatatcacgaaagaaatggactacttaaatcatcaccaagtagtaattggcttttttagtgatgaaaatagcttgcttttaacaatcgtgagagccaacgaatatggggcgcatatccgtcctaaaaattcgagtggcttcttatggattccgtcaaggcaagctattaaagagttcgggaaaaacgttactgcaaaagacgttagaaataagtatcagctgttcatccctaagggaaagcacattgcggctgtcaatcaagacggcaaattggtcacatatttctatctgatgcaaaaagtagacattccagcccgtgcctttatcagaaaaaccggcatagattaccgtcaaaaataccgccgatatatcaaggcaggtattgaagagattatgtatgatggcaaaactggtaaagacttgcttgaaaagctgggacgcatgggcgtaagtgatatgagagaagtaatgagacgttggacaaagccaggtaacgcaccgctgaccatcgataacaagcgtggggctaataaccccttggttgacactggacagcttcaaaaacgcattacttggaaaatactgccaatgacagggggcacgctatgagtttctacattccgtttgcggatatgctggacagttttggagtagatttaacggtttacccatatgacagcccagcaaaaaaagctcactttcactacgtgggcggtgtaagagttgaagacgatgacgcgccaaaggtgcagccggaacagcgacatgaaccggttgttccaaacaatgcgcaaaattctttcatggctcaattttatacgggtggtgagatggcgcaggcagatctcttatggatcagctctaagctttatcccacgaactcggtcgtagaagtgccgtctcagccaggtcaaaaatatcgaattactggcaattccaactttcaaggctattctgacgttgtcatttacgcattaaagggagatgataagcaccctaatggctagcaatttaccggtattgagtgatcattttttagtgcagtacatacttggcaagctggtcaatcaggtcacgggatgcgaattggttgaagatgcaaacattgacgaaatggaggattatccgtttttcactttcaaatggattgactttgaccaagagccaaacgccgactggctaggcaagcatagacagtatatctgcactatgcagattgattgtcactcaaattcgagcgtacaagctatgagccttgctagaaagctgtttgaagcactccacgaagtgccgtatcgcaggttttttaagcaagcgtacatagtacctcaaagcattggtaacacgggcgatagaaccactttacagggcattaattatgatcacgattttggttttgattgctctttcaccgttactggtggctttgagtttttagaaaaagacctcaactttaatgtcgaggattacacaattgaatcaattaaaggcacatcaagcgttgtcggcagtgataccgacggcgcttttaatgtgtccaaaaataaggaggaaatttaatggcagatgctaagacaaccactgtcgttgcaccttatgaccgtgtcagcgacgtaaacgtggttatttcagttttacacccacgtccagtagttgggctgggtaatcttttaatcctaaatgctgtcactgcaaaggctccaacgccagcgcaatcagatggcaaagacggtaagagcaccgatgctaacgcacaaactacgccagcaactaccttgccagatcaattaagcgtacaagaccgcatgaacggaatcctattacgcaagactgacaaggcaactggcgcaatttaccgcgaatacaagaacattgacgcggttgcggttgattacggtgaagacaccgcagtttataagaaggcacaaacctactttgcacaatctaaccactccgaccgtgtggcagttttggactatgacccatcaaaggcatacgacgctttgaaggctttctggtactttaactggacctttgcagttcgcacatctaatgacgttgacgacaacttagttgctctgtcaaacattttcgaagccaacaagaaccacattttagtagttcaaagcaacgatgtgactcaatttgacaagatttacggtcaaaattacaccgttggcttgaagcatgacaccgctgaaaacatggacagtgctctcgttggggcagttgctaccttgaccgttggttctgtgacctggaagttcaagcaattaaagggtgtaaccccagaagtcttgacctcaaatgaattgtccgcaatccatagagcacatgcattcgcatatgtggaagttagtggtgttggtgaaacatcagaaggctggactatgtccggtgaatacattgacgtcattcacggcattatctgggtcaacaccaacatggaaaacaagttagagcaattcttgcaagaaaatggcaaggtctcatacgaccaagttggaattactcgaatcaatggtgttgctacgcaagttatggaacaagcctatgcgcaaggaatcatcttaaccgatgaaaccactggtaagggtgattacaccgtaactacttcacaacgtagtgaacaatcacaacaagacttgtctgaccggcattacggtggtttgagtttcacttaccacgtttctggcgcaattcacaccattaccgtacacggtgaagttcaatcagacacgattttaaactagaaaggatttattagatggcagctcataacaacgcacaaacggggttgatgggcacctacgacgccaataatgtttacttcactattgacggtaagactgcttatggctatggtgcaacaacccttttcactttttcatacgataacgatttgttatcagttcaacaagaccctcaaggaacaggtaccgcaagtattaacaacaaaactggcggtacctttactttaaccatcaatcaaatgtcaccatttaacaagatcattgatgatttagccgatgaacgtcgtgtcggtggttatgcggttgatgcttgtgatggttcacgtcactatgtgggggcacacgcatatatccaaaagaagcctgacggtggtgccgcaaacgaagccggtgaaagaaccatcactgttaaggtcttaaacgttgtagaaaattcagttctttaattaaagcgaggtaaaaatttatggacaacactactaacactgaaaaccaaaacttagaaactactgtaaatgttgacgcacaagcaacagaagcaccaaaggcagaagataagccaattagcatggctgatgtcttagctgctagaaacaagcaacttcaaaccggtgcagttcctaaccaacgtggtatcactaaggacatcactcttaacgctggaactccacaagaatacactttgacgcttcaatacccaggttttgccattgcttcaatgattgaagacgattcaacccgtgacggtgacgttaagctatcactcgtattaagcaatgctgttgataatgacgtatttgttcaaccacgtattaagagccttgatttctgggacactcacaagggtggggtagatgttgcccgtgaagtgctttcctttcttaacgacggaatcgacggcaacttggaataaggaacatctaaaagaagcggctgaccgttgggaagacccaattaggttggctatgcacggtattccgcttgatttaaccatgaaagcaaacaggaaccagttaaacatgtactgggaaatcgtgcggagagaagaaaaacaacgttttaacatgcaagcaagcgccaccggattaggtgtctggggtgatggaaagaaatagtgaggtgaagtcaatcagaaaataaactgatggcttttttattttgccaaaaagaaagggcgttaatacatgactgatgcacatgaaggcatgtcgctgtccttaaaagctaattttacgcaagtgaatgaggctaaaaaggctacacaggctttaaactcagcgttcggggaattgcagagacgtgcaaatagcttgcacatgtccgctaattttccaagagaaataaaccatattgacacggtaaccgcgtcatatgttagacgtctggaatctgagggtaaaacatacgaggctaatcaacaaaaggtcaaggcatatcagggcgcgatcggcaaattaagcgccgagcagagccgtttgcaaagtgccttgaaccgcaccactagttctactgacaaggctagtgatgcttatagaagtcagcaaataaaacttaaccaaacagttgctgaaatcaacaagtttaaagctggaattaagtccgctcaatctgagatggaacgaatccatccaaccgggtttaaccgctgggtaaagggtgctaatgaggtcaccaaagccaccagtacgatgaagagtaagctccacagcgcgtgggacagcatccgaggtggtgcaacagttgcggcggctggaattggtgccgttggtgcggctgccttttctggcgctaagcaatcagcggcaattcagcaaaggtaccgcgaaattaacaaccttgctgttcttggtggtgaaaagcaaaaagaagtaactaagtcggttactgaaatgcaacgtcaagggcgtgacatgtccattaaatacggcaagtcacagcaagaaatcgcggcagggtatgaagaccttgttaagcgtggttataccaccaaacaagcaatcggagccctccaaaccgaattgcaagccagtgtggcatctggtgacaaattcagcgatgttactacggtatcttcacaggttcttgacgcattcggtatgcgtgcagactcaaccagcaagatgctgaaaaacaccaaaaacgttgttaacgagttggcttactcggctgatgcaacttcaacaggttttagtgacttaggtgttgctatgtcgtacgttggtactgcggcacactctaacaacattagtttggcggaaacagcgtcagcgctaggtgttctatctaacaacggtttggaatctgacaaggctggtactgccctacgtgccacaatcaatggattaactaaccaagttaacaagatcggttctaagaattctatctttaccaagcttggcattaaaaaatctgaaatggtggacgcacacggcaacctgaaagggctgtcgcaagatatggctgtgctttacaagcacattgaagagcatagtaaaggtggctccgaccaaaacggcttctttaagtcgatattcggaactactggcatgaacggtgccatgattttagctaaacattcgaaagaagtagaaggcttaactaagcggacagaaaaagccggtaagactggtacgtatgtagctgaattagccaaaaagaacatgggtaccgcacaaggtagcgccgccagcgctcaacaggctatgaatgcctttaagatgacgctgggtaacgctgttttgccggcaattaacgaagcaagtaactcgcttgctaagttcttactatcaaaagatggtgaaaaattccagaagggcgttggtaaagtcgtaggtgactttgcaaacggtcttgtaagcctgattcgttttgctacacggcatgaaacgatgatgaagtttgtcggtggtggattcttagcaggatacgcaaccgtcaaagttgcaaaagctgtctcatttgtgggtggattgtacgaacagtacaagaagcttgctgatataagtcctaaggttgcatatattggtaaaaccacggggcagttaactggaacaaataccagctttaaaaacatgaccaagggcgcaaaattagctgttggcgtatctgctgtatttaatgcggctcaaatcggtaacgacttttatcaagctgcaactgctaaaaccgcaacgcaaagaattcaaagtgctggtgctggtatcggtggacttgtcggtgctggaattggtggagttctcggtggcacggtaggtgctacgattggtgcacaacttggtcaagctatgggacctgatgccgctaaaagttttgtaaaagcctttaatggacatgctgcgaagtatttggtttacggcaaaaaaggcagcaaatcaaacggcaagtatgatagtcaagccgaaaaatataatgaatccggttattacaccctgtccgaccataagctgaaaggtaaaaagcttctgtatgcttatgatgacaatggatactatgatttaaagaccaataagtaccatgatcaacgctcccttgctgaacgctcatggggaatgaatcatagattaaatttaaagaccttagcgcatccaaataatgcctgggatcttttgagtggttctgcttctacgatttggaacgctgctggacatattgctgatagagacttttggcgtagaagcggtccagaagtcaaaaaagaaaccaagggaacttggctggattggagtggcttttataagtggattggaaacaatccgcatcttaatccacacggtaagccaagtgatggaatggatagaactagaagtttattccgcgatattggtaaatgggctggaaaacaaaattgggactggggaggctttgatcctcagaaaaatggattcaataaatggctagctggatttaaaccacaagttcatggtaaaaagccccaaaatagtcaattgcagcttaaagcatctggaattcttccaaaagttaatgctaaaaaatgggctgatggagttgttaaagatgctcaaaaaggcatgaaagacttcccatcttggactaaacagcttagtgcaaagtctaataagtggtttaagtccaagtggaacggcatggagcgctggggtggtaaaactaacaaagacgttcaaaaaggctggaaaggctttacttcatggtcaggaaatttaagtcataaatcaagcaaatggttcaagtctaaatggaatggcatgaagtcatgggctggcggagtcaataagaacgtacaaagcggttggcatggtttcacctcatggtcaggaaatctaagtcacagatcaagtaagttcttcaagtctaaatggaatggcatgcaaagctgggctggtggaattaacaaggacgttcaatctggttggaaaggcattaaaacttggtttggcaatcttggtaaaaatgccgttgacctatttaaaaagccttttgaaggtctaagtaaatgggtcagtgatcacacaccaaagcctgtcaaggcggcacttggtgcagttggcaagggagtcaactgggttaaaggtaaactaacaggcaaggcacacgccaacggtgggcttatgcacgcctcacacggtgcccttgtcggtgaagctggtcccgaattagcatacaaaccttatgctaacaacgttcgcttgcttggtgctaatggtccgcaatttacaaaggtttatgctggcgagcatatcctgaatgcacgcgataccgcaaaggtattaaacggcggtttaggtaatgggctaaccctcaaaggctacgcaagcggaactgataagcttggtaaaacctcaaagaaggtaactaacgactacaaacaaattgcggacaagtcatccaagtcacttaatagcctttctaagaagagctcaagcacttggaataagattacacgtcaaacgggtaaagacagctctaagacccgaaaacgggctatctctgactactcagacatgcacaaaggcattgtcaagcagatggacaagacccatgacggtgttatcagtcttagtgaatccactgcaaaaggctttggtaaagcattaggcaaaactaaaggctttgccagggatgcaatgagcgactcaattggtgagattaacaagggtattactggaattgacaaggtccttggacagttcggcggtaatacctcagttatcaagccagttaagtttgctactggtactgacgcaaacgggcgtctaaccgaaaatacccttgctatggtcaacgatgcacaaacaggaccaagacaagaagccttagttagtgacaagaatgaattgttcttaccacgtggcaacaatgtcaccatgatgctaccaaagggctggggtgtcctcaacggggcgcagacccaacaggtggctaaatcagccggtgtaaagcattttgccaagggatcagggctaagccatagcgcattgagaaagcttgctgagaaggcgggagccaacccagcacaaagcttcaaagaaatgttcttagacaagctcaaaccaagcggatcgaatttaaagcgtggttctatcggattagcgcaaaattcatctcagcacttcggtaattcttggtctaacgcgatgtggacggtcatcaacaacgcaatcggcggtggtgatggtaaaggtggcactcgtgaagcattcctgagatttgctgagtctacattctctggcgtcccatatgtcatgggtgctatgagtaaggcggctagtgactgttctggtatggtcgcacaagctttaaagcatttcggaattaatgctgggcgttcaactgttgatatgcaacatagttccgccctccaatatcttggtaaaagcattaatcgaactattccgggtgacttggttattttcggtcatgggacaggcgcagccggtcacgtgggtatcgtcaagaatccaagaaccgggacaatgttcaatgaaacaccgccaaaagcgcgtgtcacacgaattgctgatgacatgggtatgggctatggtttctaccgtgtcaaagggttacacaatgcatcaactgctaagaagactgcaaagccagctactaacttaactgcactagcaaaacgcgaacttggtccagccgctttaaagtggattaaggacaagttaggcgatgaaggttcactcggtggcaacatcggtggtgaaggcgtcaagcgttgggctggtacagttaaacgagttcttggtatgttgcacttgtctacttctgattcaatggtcgcaagagtattgcgtcagatccaaactgagtcaggtggtaatcctaacgcaagacaaccagggagtgacccagacggtaacggttctggtccagcattaggacttatgcaaactaagcgagcaacattcgaagcctttaagcgtaaaggctctggcggtatctttaacggacctgccaacatttacgctggcttgaattatgctaagcaccgctatggttctagcttgtcagcattaggcaatggtcgcggttacgcaaagggtggacgtccaaaagcacacactccatttattgcaggtgaacgtggtccagagctaatcactgctgacggtcctgttaaagttgatagtcacgaacaaacaaagcgtaaagtttctgacttagcgcaaatgtttaagtttccaaagattaacagacctacacggtcacacagctcagcgccggtcattaacatcaacctcaacggtcctatctacgggacaagggaggatgctaagcggattgcggaactggtacgccgtgaaattaataaggttctagtaaacataagcgatgaattaggtacggatccatcgctttattagtaaggagttgtttttatttggctaaaaaagaaaagccaaaaaacaagtctaagccccgtaaggggcgcaaaaagactaaggcgcaaattaaagcagaaagaaaaataaaagaaatcaaagataaggctgataaagctcaccgtgcggcaatgaaagccaatgcgacggcaatgaacttttcagcaaaagtctttaacacgaaagatccaaagctgaaagctaaatatactaagaagtttgaagaatacatgaaaaaatatcatgcagacatgaaccgatacaaaaagtatagaaatcagcttaaaccagctaagaccagcaaaaagcgtgttaataaaagcaagaccacggatcaagccgcgatggtcagcaaaattgaacaacataaaaaagaatttacgaatgaaggcaatatggctatttttcctacactcaacgggacagaaagcgatattgtcttttttagccccacaaatacggaatcagaaagcaattcatcaaacattacttcttatgccgttgatcagggggcacctcgtaaagattacgcaagattcaattctaagacggtcactattgacggtcttatttctgacgacattaacggcggtcgcacagcccatgataaatgggtgcagttaagaacgtggcacagtcaccatgaagaattaacgttccgtggtgacatttattacaagcacttgctgatatcacaacttgaccggcaatttaccggtttcaaaaacacgatgcaggtttcaataacttttacatttgttcgagctgctgagatcacgacaagcggcaaaaagaagaatgctaagcggtcgaagtcttctaagacgttggcaggcaacagaaacaagaactacaccgcaataaccatcaagccgggcgataccctgtggggattgtccaaacgctatggtaagtcggtttcttggcttcaaaaggtcaacaagatcaagaatcctaaccggatttatgccggcaacttgatttatgtcaacgataagaagcataaggctaaaagcaagatgcgagttaagtaaggaggggtgaaatgcgtcaatatattccagtgaacattgatgatttgccggacattttcgacatcgaattggctggcgaggtttacacgctaagaattgactataaccccgttgctgactggtataccatcactatttatcagaatggcgaaaccttgctagaacaggagccgcttatacttaatcagctagtcgctattgatattcctgatactcgtttacctcgaattgatatgagagtgatggacgaaactggtaacgcaaaagatgccggcaaggctgagtttggctatgatgttcaaatttacattgatgtgattgatccacttggttcagaagacgaagacccgactatcaaaccactggggtatgaccctgacgaagatagcgatgatttaacggatcaggaggtctcatattgatagttactagcaacccacacatgtggtttgtctgcactaacgataaaggcaaaacccaaaccgtttacaacaacgagcattataagcataattatccgtttacgtttgaagttaactttgctgattcgtctacgccacagcaaaatacggtcactttgtacaacatgaccaaggagcatgcaaatttttatcataagaaattctattgctatgttgcgtttaactggggaccagataagaagattcttgctgagggatttatcgaaaaaatcggcattcctaaccacgatggtacaactgatacctttacaattactttcactgagggcacgaattacagcaatgtagccgctcgcaaattgaaagtaacaaaagaaaagaaggtcaacaaatatgtaacgaagtgggtcaagcaacctgataagacggttactagataccaccattacacagagaccaaagagtacaaacgaggtcctaaaaaaggacagaagtacacggttcgccatcgaacgccatataaagaaaccattaaaggtaagtggcgtaagaaacggattaaaacccgtgctacaaaagtagtcaaagttaataagacgtttcgcaaaggcacggactataagactttgatcaaaggaattgcaagtcaatcaggaatcgtaatttctaagattgacttagcaaagaatccaactttgaaaaagtcatttaccgcaaagggcaaaccattaacactgcttaaacaggtggtcaaaaaaacaggttcaatcatgacctacattcaaggaaagcttgaaatcattaatccaaaaagcacaaagagaacgtggtatgagattgatggccaagacctgttacagccaccaagttacaacgaaagtagcgatgacagctccggtaaaggaacgtgggaaatcatggttccattggttccagacataaccaccaacgtggggattcacatggaaagtaagtatttgaaaggctatttttatgtgaaagccggtcaacatacatttgacatggataaagcacaaacgcaatgttcacttggaaagatttaaggaggtgagtgttatggcacaatcacaaaatgaagaacgtaaggcggctatcaacgcaatgcgcaaatttcaatggggcattatttctggaatggaaaatgcattaattgcaaaagttattgactataacaagaaagatcatacggcggatattttaccgcttgctaattcaagcgacggcgaaacatcagcacaatatctggatattccggttactgaaaattgttacatgttggatgaaatgattgagcgacttaaaccagaatttaaaagaattgattctgaaacgggttcgcatttggttgataagctgcctaaaaagaagcttatgagaaagggcgtcccagtagttgcggtggtattagaccgtgataatgacaactgggaaggtggtagagctgtcaacacttacactccgaatagttcaagggttcatgatgctaatgatgcgattattgttggagttctcggaggtgatgcgaaaaatggctaaggatttattagttaatgagtacggtgatttagttattgaccctactactcacgacttagcaatcgttgaaggaattgacgaaatagcccaaagaataagggctacactgttaattcgctacggtgaaatgcctaatcttgacccagatcaaggcgcagattacagcaatttcattggtaagaattttaacgctcagcttgcatccgctgacatgtctacgaccatcacagaaaaggttccagaggtcaaaacggttaatagtatcacttttaagaaaatgcctagaagaggcttatatgtggcttttagcgcaactgttcaagttggcgatggtcaaccgaaaaacgtagagggaggttttgaacttggcgatagctagtttcggactacacaagcgggggttcttagctcccacatatgaagaaatactggacagtgtagaagatgacttgatgcaacgttttggcaccgatatcgtcctgacaagtaattccaattttggaattattgcccgactgatagcgtggcgcgaaaccttgctaattcaagaactgcaaaaaacttactattctgcttatatcagcacggctactgaaagctcacttgatcggattggtgctaacctagatcttccaaggaaagttgctacaccaagctttgcaaacattcaaatcgtgactgatgacgaatatttgatacaagcaggtgaacagtttgaaaccgatgacggtgttgtgtttgaccttatcaaggacgtaactaccgcaaaagattcaaatggtcagtacattggagtaggagttgtccaatccgttgaaactggtgactttaacaacgttttgcctaacacaatcactattgtttctaatccggacgaagacattattagtgtgacgaatccgcagaaggcagctggcggacaagatgatgaagacgactccacatatagagcgcggctaatcatggaaaacgtggcaaagcctggaccgtcaacagctggtatcaaatcagcattaatgaatttaccaggagtaagacaagtaaacattattgaaaatccgttcgcagacgcggaccaatacggaaatccaccgtattcggttcacgttttttgtttgggcggaaaagaagacgatatagcgagttgcttagcagataaagtagcggctggtatcagtcttactggtagcaaagaagttcaagcaaaagatgcaacaggtgaggttaaaaagatcaattttgattacgcaaccgacaaaccaatttatgcaagggtcaaaattcggacaactgacgaatggaacgccgacgacggtgctgactatgtaaagcaagaaatagctgattgcatcaacagtttactgatggacggtaccgtttacctaaccaaaatttatccgtctatctattcaattgagggcgttggtgaggcactcgttgagatcggaactgaccccgaacatttagcagataaagatatacatacacagccgtttgaagccgtctcttgtgacactagaaatattgaggtggtcgtaaatggcatatgagacttctgaacagcttttagctgagatttcagactactggtataagcgacctggtggcaatctttataagctaattgatgcctttaacgagccactagaagggattagtacaaatgcaaataaggtcgagcgctggcgtgctttaaaagacgcccaaggaacaacgctcgacctttttggtgccgacatccagacatatagaccaagtcaagacgacgacaattatcgcttcattattcacgttgtggagcttctttcacgggcacagggtactgtaccctcaatcgtgaaaataacgtctagtgcgcttgaatatgaccacggtttcaaaatctggaagacaggtattcgtcacgtagggatgcagataccgtttgatgcggttcaaaacccgcaaatggaaaagtttatgcttaacaacttgcaaaaaatgctggcgatgggttactggcttgacttgataatctttaaagctactacacacgttcacggctatctaggtgccaccacgcaagatagggaccatgacatcaaaacatttgcgtctatctggtgggaaggctacaaagctaccacgtataaccattggtattttgggacagacattaacgagttgcaaaacactacacatgaagaagtggctacttggtgggaaggttggaaagcacaagcaaagcgcatgtcgtacatcggtaccaagcttttaacacatgaatatcaagccttaaaggcaatctaatgaaagaaggtcaaaatggacaaattcaaagacaccattatcaccgatgcagggcgtaaattactcattaatgtcggcgctggtaatggcgaaattgcatatacacgggcggtgctagctggtcaagatgtcagctctatggctgatgaagacattcgaaagcttgccacccttgaaaatcaaaaaatggaggtcaacgtaattgttacacctccacaagacaacacaatcaccgtttcggcttcatttggcaacaaggacttaacggatgacttaacgtttagctcagtcggttggtacgctaaaaacaacaacgataacaaagaaatcttgcttggtgtatcaccgtcaaacggagaacaaacactagcggcaggttcgccagatcaccggtcaacggcttcaattgacattgatttagcaatggctatcagcaatgccgcaaaagttgacttgacggttaacgagattggcgtagctcacatgagcgatgtcaacgcggctattttgaagctcaaagcggagtatgacccgaaaattgagcaagctggcaaggtcaaaggtgcaaagatcaacgacggggcggttgttgaacccgatgatgacggtattcttgacttgatcgttgatagtgaccgcattaaggattttccggcagatttaaaagacctcaatgacctgccaagcgggacatatcggacttcccaaagtgctgctagctttgtcaattaccctaaaatgcaagatggaactactccttttaatatcccaatagtctggaaaaacgcattaatcaaagtagtcaaggatgctaatgctggataccagcttatagtgtccagccaacaaaaatatgcaatccgctattttagtaataatcattggggatattggtttcagcttccgacattatctaataatgacatcatcaaattaattgactccaaggttgacggactaaacatcggcaattgcgccactaagacggacttaactagtgtttctaactcagcagtcaaaaaggttaatggcttaacccctgacggaagcggcaacgtaaacgttacctcaaccgttgcccgcggctttgatgctaacgcaaacgctacaactaagatgacggaagaaaacctgcacggcggcaatcagatcttgatggatcagaatgcaggtcaagacatcgttaactgggcaaaaggtcaatttaacacactgaacgggaatatcaataagctcaacgctaaaactgaaattcccggtgttgccaatgcaaatgatttagttggtgacgcttcttcaatcagtacttacaaattaagtaactctggcaatcttaatgtgccggatttctacccagataagcgtggcacgctaatcaacattaattatgatggaaacgctaaaactcaaatttggattccagtaggtaattcaggtggcgactcaattgctttgaggtactgggaaggcaataactatcctaaatggaaaaaacttgcaaccgttcaggatacaaccaacttgcaaaaccagatcaacgacttgaaaaagtcaaatgctgatttgatcggcactgttaactggttgaaggataatgccgcaattgctagaagattcccagctagtcaagaagcgcaagctcaacaatgggaaaatgatcatccaaactactttgcattgatcgaaaaaataggatagaaagaaggtgaaagcatgctagaccacatgatctttgacagactgaaatggttcaacatcagtgacaatactgatagcgtgaccgcaaacggcaagaattggaaagctattcctaaacaagtagtcttgccacaaggggcaaaaatcgcaactttttctggtgatggttctgctcttgcaaccgatgccataattatgctaaattctgacactactgcgaatgtcattggtaaaattgcggactgttacgcagttactggtgtttttaatggaacgggtcaaagcacagaaaataacgctacattaaacttgagctttgatgaagaatacatttttgacgatcatagatatgaagttaattttgtgtcattcggtcttattcgtgaatcagatgttaaaagtacaaaatggggggggtaaaaaccttctacatactgttgcatcaatggttgaacgtgctttctcttcaattaggaaaggagcgaaaacatgctagatcatatgctgtttaataggttgaagtggttcaacattaaagacgatgctgaaagcatagagatagatggtaaaacttggcaagcatttccaaaaaacgttaaaattaatgacactgctactgccttgccaattggaaatataggtcacggcacctacggcgtcataggagtttcaatttcaaattatggaaaaatttatatcatccgaactgatgcaggtcccattgcaattaaatctgatgccgtaatatctgaaaactggggggggaatacctcacttatacgcttgtatcaacggcttaggtcacttttctacccacgtagggaggtggcttaaatgctagatcacatgatttttaacaaattaaaatggtgggactccacgaaccgcccactgatcggtaaaagaatcactgcgtcgcttgatacttaccacacggttaaagcgggatttaactttactgctgcggattatagcaatgtgccggctaaaaccaaggtagaaaatgccttaattgtagcagcttataaatttaatgggtcagctggtaatgcgccaagcggcacatatattttgactgatcaagataattctaaatggttaaaacttgatggctcggaaaaattagggggggtaattagcccgctaaccaacttgcgtcaagcgtttagggctactgctagaaaggtggtggctctatgattgaaaagatgatcttcaataaaaatgattatcttatgttccctaaaaaggtcaaaattccccaaggagctcaaataagtaccatttttacggattttccaaatactacttactgttcaatgaacgcagatctggaactggacgtatgcgcttcttcgaaaaacggctatctagttggcagaaatagggatttgccaattatcagtgagagagatagtagcaccgtctatggtcctgtatgggttcgaaaatcggactgtacggaaatcttagggggggtaattagcccgttaatccacctataccaagtacttagagccgccaccagaaaggcggtggctgtatgctagatcacatgaagtttaataaagaagactactaccctacaacaaaaattattgtcggttatgtaaatacagaattaattggcagagcgataacttgcagtaaatataaagtaggatggtctagtgagggaagcattgatgcttgttataactattctatcaatagtgattcgattcaatggaataaaccggatgaaataggcggcttagcttctacgggtgaaatcacaggcgttgtggtagatcgacataatattccatattatattgttaacattaatcattggatagataatcctaatactggtgatgggatatacacaccgcttatcaaagcatcggatatcatgactaagtatttatcaagggaacagttatagtattagtactcattgagtgctttttttatgcaaaaaattaaccttgctcacggggagttcccgtgggctttttatatagaaaggagccaattatggctgacgaaacacaagttgcaccagtagctggcgcacaagaaaacaatgctacacaagaaaacaaggggtttacctattactttagtgatcctgactctgccaacgcagaaatgcatcacgtagtaattacgttgccttatgagttgccagaacttccatggcactggcacattgaaaagccagacgacagcttaaaagatcctgtctgggacttgaaggttaatggctgggtagaaaactccaaggacggtcaagccgcaatcttgcaagaagctacacaaaagattgaagaattggataagaagagcgcagaacttgataagaagaacgccgcacttgaccaagccaacgataagtttgaccaagcaatgaaggccatgcaacaaagccaacaagtccaaacacaacaatccttagcattgacccaaggcttgcaaaaggtcgcagaagggcaagaacaagccaacaaggttatggcttcaatgcaacaaattctggttggcatgcaagcagatcaagctaagactgctacaccaaccagtgacactaagccagcagaaaacactaacaagcaagaaaacggaggtaactaattatgactgatttaaacgctttatttttacaaatgtgggtacttgactatcaaatggggcttttccaaaagccttactttcaaggcttagttcaacaaggcttattggacgcagcaggttacaagaaagtcacaggtgaagactatgttgcaccgcaagctcaacctgcaccacaagcttagtcgctggaatttcatcaaaacagggctgttaatctcggcattggcggtctgctttctgatagatcgaacctactttttttacccaccaagtctagcacctgcgtggaataacgtctgggtcgatagtatcggcttgatggcaggactaattttgattttgtgcggtgtttttgatattcgggtacagttaatcatcaaagttggtctaggcgtgtcagtagcattcttgacagttctgctggttgcggaaagctttcacatcgttggagccggctatttcagattccaccctgctattgtttttgagatctacgcaatcattaaccttatgcagattgcttatgagtatgacccacaggactgagaaaggagctgatacacttgcaaggtcttaaagacgtacttagtgtactagctccattcctgttggggttgtttacttcatatctaagtgataagagaaatacgagacaagacagccatagctttttagtagacgactatgaggctgtagttaaagaaaataaggaattacgcagggaaaacgaaaaattgcgaaaggagttatccgaaaatgaaaccaaacactagaattttagactacaccactcttgtgcaagatggtgttttaaccttggacgatgtgccacaagacatcaaaggtgcagttaccaagtgggtgcgctatttgtcaggtatccaagacgaaaccatggtcaaggacccagacgcaaccaagccagcggtagaggataagccagtaggctacacccctgctaagacgggcgacatcactagcggcgtacttactactaagaaggtgacccaataatgaatctcactgaattaactgcttacacacaaatagttgttttggctatcgtggctatctgtatcggtatctctactagtatcgaatactttgccaaaaagtcggctaaaccacttccaaagcaagtaatgaccattgatgagattgctaagtttgtcgtaagcgaagccgcaacgctggatatttctggtgccgaaaagaaggtcaaggctgtacaagccttacttgatcaagccaagcaagaaaacaagccagtgaccgaaacagtcgccaagggtgctgtccaacatgcttatgaccaaatgacagcggaccaagccaaacaagaggatacacaagataccaacgcccaaccaattggctttgtatcaggtgacgacaatgatgacaagaactaagacgtataacgagtacgtttttgaatcgtttgacaaatcgtttgaaaaccaaacgaaaggcggtgaaaaagatgtcaagctcaatcgtatcaaagaaaagctatggtgtggacgtagccagcttccagaaagaaaacgttagctacacgggtgcgaaatttgctatcgtaaagcttacgcaaggtactggatacatcaacccgaaagcaaaagcgcaaattaaatctgcaaaggctcatggcttgctaaccatgggctatttctatgccaaccattccggctcggtcacacgagcacgggcagaagctaagtatgccgttgaaaaggctaaggcttacggagtcccagctggtagctacatcgctgacgactgggagcagggcagcggcaacgacgtcaacggctctgtcggttcaaacaccgatgctgtcatagcagctatgcaagtgatcaaggaagcagggtataagccacttgtctatgctggcgcttatgttttgcgtaaccggctcaacacagctcgaattgtaaagtcattcggaacttgtttatgggtagcttcatataaagtcatgggtcgtcaagattccgctgactttaattacttcccatccatggacggtgttgcaatctggcaatttaccgataactataaggggtataacgttgacggtaatatctgcttgatcgatttaaaggctaattcaggtagttctaagcccaaatcaacgaacaagagcgtagaatcgctctctctgcatcccgttgtgaagtggaatattggtgctgtcgcagtagtatctaattcaaaaggtgcttatgtctacaccagttcaaagttagacaagcgggaatctgacaagctaaaaccgtgtggctccatgtggcaggtgtttggcttggaaaatggcgctgtgaaggttggcaagaaccaatactttgacggtcgtgccgtttacgtaaaggctaaccctatcgcatataacgactcaaaacacgctgtcgctaagattgttctgcctcacacccaggccctggacgcaccaaaggctgacgcaggcaaggtctacggcttgaagcttaactcaaaagtcgagatccagggaagagtcggacgctttttaaagattaaagagctacacaaaggcaagcaggtatatgtgacgggcaaccgtgcgtatatcgtgctgtaaactttacaaagatggatagatagccataatgagctataatttatccgtaattttatccataataaaaaagaaaaggggttgtaaaagctccaaatgtcgtgcataaagccacctcgggggattgttcctctggggtggcttttttgcgttatattttaatttttattgcaaatgtagatacaaaagtatatactaaataaaaaggtttaattaagacttgtaaggagatttataacaatgtgcaatgtggaattgaaacaatggggcaattcactagccgtacgactgcctaaaactattttaagcaaagccggcatcaatgaattaccgaccaaatttgatgtaacagttaacaaaaataatgaaatcgttttgaaaaaacaaaaagagcctgaaagcttaaaagagcttttcaaaggctttgactataaaaaatattggagcgactgggaaaaagaaaatcctggcaagtccaaagaagaggactggggcggaccagttgggcgcgaagtcttttaatttagaagtccttattagaagggaggtgataatttgaacagcagaaaagacttccatcaaggtgatgttatcatgatgaactttgacccaaccaagggacatgaacaagcgggctatcgtccagcgcttgtcgtgtcaaacgatgatttcaatatgatgtgtggaggagtgatcaaagtggttgctattactactaacgaaaaagaatttccactacacgttgaaattccagaaggtttgccagttcacggcagggtagagctggatcatgaacgttcaattgattctcggtcgaaagccagagaatgtaagtatgtatgcagtgtaccgtctgaatttttagatgaaattctccgaaaacttgcattaacttataaaaaaagccactagggagtaacactagtggcaaattaaagcttatatactgtctatatggttagattcagtatataagcttttttggtgcttgtaaagtcgcctgattttatagatagctttaaggcggtccaaatcaaacgctaaaaaattggcgtgcagatcctgaaaagttaaaaaatagcatgggagagggtacacctactagctaagttgcatgatcttagaaaactgccaaaatgagaataaataatgtgctataataaattttggttgcaatgcaggattttcaagtcgatcggcctagcaaaaaccgctcacagcttggctgtgggcggtttggtagttatcaaaaatctactgaaaatctactgaatacccagcagatttaatgtgatctgttgggacaaatcaaaacgaaaaggactataagttaacgtatgagacgtgatagtacaagaatttatattgacatcaacggtaaataaaaatggctaaaaataaaaaaaatagtgtaagtacaattttacttagagttgctgctatcatattattgcttgttggtattgctttgatatttaacaaacagatcagtgatcaattaattcatcataatcaacaatctactttaagtggaataaatagaaagacaattgaagaaaacaaaaagaaaaaaggaatgtatgattttagtaaagttaagtctttaggcattgcacaagcagcaagatcacaagtgaaaaagacttctggtgcgattggtgcgttagctattcccgatgttaatatgtatttaccgattatgttggggatgagtgatgatgcaatgtcgactggtggcggcacgatgcgagccgaccaagtaatgggtaagggaaattatcctcttgcaggtcactacatgacagcaaaaggtattcttttctcaccacttgaagatgttaaaaaaggtgagttagtttatttaactaatcttaacaaagtatatgtctatcgaatttatatgaaaaagattgttgatccaactgcggtttggctagtcgataatactaagaagaatattgtaactttgattacttgtgctgatggcggtaagaatcgttgggcaattcggggtaatctgattaaaactgaaaaggctaacaacaataatcttaaggtttttaaattaaaataaaaatttacaatctttaatcagatttagatttgcgataaaattataaatagattttgtaataaagacactcaacaatgagtgccttttcgttttgatgagagaacataaggtgtttgataattaatgaaatggcaagaaagaacagctgatgaattagcaccagacttgattgagaaatatcaactaggtcccattgcagccaaactttttgcattgcggggtattaatacagacgaaaaacttgatttttggtttaatgcaacagaagaaaatctggctgatccagcgttaatgcatgacatggataaggcaattaaccgaattaatcaagcaattgatagcggcgaaaagattacaatttatggcgattatgatgctgatggaattactgcaacgactattatgactgaaaccctaagcattttgggcgctgatgttcattattttattcctaatcgcttcaatgatgggtatggtcctaatatggaccgctatcaagatattgtagctgatggaaccagattgattatcactgttgataatggtgttactggggtcgaggaagtcaaatatgctcaagaacataatgttgatgtaatcattacagatcatcatacttttcaagaaaagaaaccggcagcttatgctactgttcattgtaattatcctggccaaaaatatccttttgatgattattgtggtgccggagtagcttacacgatttgtcgtggtctaatgcaggatactatgcctgagctgctagatttggctatgatcggaactattggcgatatggttaaggtgaccggagaggggcatattatcgttaagcgtggtttagaaatgcttaatcagacagatcgtcctggcttgcgcgctctaatcaaaaatgctggtttgactttaggcagtattaatgaaactgatgtcggctttaatattgctcctcgattaaatgctgtaggtcgattagataatgccaacttggcagttgagcttttgctaagtgatgatgaccttgaggcccaaaaaattgcagataagatcgaagaattaaacaataaacggaaagaattaaccaccgaagtctatgacaaatgtatgacgttaattcataaaaatagctggcaaaaacaaaatactttggttttatatgaccctgaatttcacgaaggtgtgttaggtttagtagctaataagatcgttgaaaagacacataaacccacgattgttttgactaaaaatgatgcaggtgaggttaaaggctcaggtaggtcctttgctggtttcaacttgtttgatgctttaaatccgatcaaggatcaatatttaaccaaatttggtggccatgattttgcctgtggtttatcattagaagaaaatcagattgcgccattacgggaaaaatttgaagatgactttcatgttgaaggtggtcttgagactaaaaaatatgacatggaattgcctatgcagggcttaactccgcagacactagcacaaatcaatcaagtaggtccattttggacaggtgacacgcagccaatctttagtatctctaatccaacaatcactcatttctttaaaatgggtaaagataagaatcatgtcaaatttacggttgctaaaaaaggcggtaacttatcagttattggatttaataaaggctttttgaataataatcttttgccgtttatttctcaaatttttgttcaattatcattaaatacttatcgaaatcaagtttctttacaaggaatcatgaccggactagcttttgcttcaccaaaattggcagtgccaacgccagttgttgacttacgccaagagaaatatgttatgggtttcgcggaccgctacctgttatttgatcaaaaaaatattccgattgttcgcaaccgactacagatcgatgaagacaagatctctttagttaaagattatgatcaaactggtgaaacagttgcattattagatgtgccacgcaatcagattgaattaaatgctgcattggagaaagattatcaacaaatctatttacgctttttgcttgatcaattgcctgttgaacaaattcccgctaaaaattattttggtgctgttttaaaatatatttatagtcaccctacgttaaagccagcagattaccgtacagttgcaccttatttgggactagattatgatagtgtgcttttcattttacgagttttctttgaattaggctttgtaaaattggatgaaggtaaattggtaggagagccttctcctaaaaaacagccgctgacagcttctaaatatttaatgggaacttcttctcagattaaatttgttaatcaactaagaactatgcctagtcaacgtttgattacatatgttaataatttgacaaataaatagataactattctgttttcagtgcttttatcgttaaaatttgttaaaatatactggtcaaaagcgtttgaacacaaacacagagcattttggaggttatgcttcttatggcagttgattttagtaaatatattgcaagtgttaaggattttcctaacaaaggcattgtttttcgcgatattacaccaattttgcaagatggtgaattgtatcgtgccgctactcatgaattagcggaatatgcaaagagtaaaaaagcagatgtaattgttgggcctgaagcacgtggttttattgtaggttgtccagtagctactgagttaggtttaggttttgtacctgcaagaaagccacataagttaccaagagaagttgaacgtgcttcctatgatttggaatatggttcaaacagtttggaaatgcacaaggatgcgattaaacctggacaaagagtggttgtctgtgatgacttgatggctaccgcaggtactttaagagcttctaaagagctaattgaaaaccttggtggtaagttagttggtgccgcattctacatcgaattgccagatttacacggtagagataaattacctgatgttgatatttattcacttgttcaatatcatggtgcttaaaatagaataaataaaaagagggaattaaatcaatttgaactgagacctaaaagttagacacttttaggtctttttctacgtaaagtcaagcataataagaagtttggcttcattttttgtttaaatttcaacttaaacatcttttagtgtcgatttatttttttagttagacacgacaaataagcccagatccatatctgatttttgggcttagcgttataatgtacttgatcaattaattacgactaaagtctttttgattatgtgtggctacgttgtaatcatatggttgatcattgataatcagggcataaatggttctgattagtttatgaattgaagcaatagctatctttttgaaccctttggtttgagaggatagctttttgctttcataataatctgctatatgacacggatttgtcttagctgcattatcaatttgtccaatagctcgataaagcaacttacgtgcgactgcattgccatgtttagtaatacttaaattagagtccatttctcctgactgatatctgcctggatcaattccgataaaagcattgattttattaggattactaaatctgcgtaaatctcctaactctgctaaaactctgacagcagtggtctgtgcaaagcctggaatgctttctaggttttctaaatcatgattaggcaaagacttcgctaacttaaccattcttgcgattaaattttctctttgatcacttaaattaagcaatctgtgtgcataatactgcacttgctcgacttctatgctagagcaagatacaactggataagcttgataagctaattcaattaatttatctgcagtccttagagcgtgtttaaaagcaatcccctttaagctcattaaccagttaataagctgttttttatcttctcttcttactaagtcacaatgaggatatcgcacaactatttgccagtaatttttacctttagcagaagaaaataaattttcaatttcaggaaaagtcgattgtagagcttggtgaagtcgatttttagctattaccaagtcacttgtcagctggtcatagaagcggctcaaagcattaagctgcttataagtttgggattcgctttgattaaccggatggcgataaagtctttgaattaaagctaaatgataagcatcagttttatcggtcttgttgtagcgtagccccatattcatctcttttttggctttaagcggattaataacaacatattcatagccgtagtcttcaagaaaagcctgcagtctgcgtgaataaacaccggtagcttcaaaaataatttgcggatgtttagaaaaagcggttaattcatgaagcaattgaataaaaccaggacgattattagtaatggttagttcatttttgctttcaccaattagttcacaaacagtagaagtagacttgcttacatcaattccaaaagtaacttgcataataaaaacctccaaaacttagtagtaaaacgtatttacttaagaaatcagatctaattttctaaactcgacatctagtgtccacattcttcgaagagactattgaaaacttaagtaaaactgccagtttattatgcgacatcaagtgtctaaagacctcagggcatatcgttttaccactactttaattctacaaaagaataaaaatagtgaatcaattatcccgtcggataactaattcactatttagcttagaatgtttattatttgttaccgattaatttaaattttgaccatggtttaataaagtcgagcaggaataattcgtctgatctaatagaaccgactttgttcatccttgactccttatgaggttcaaggacaatttgtagttcatttttgtaatgaccaaagttgtcgttaccaatgataatatctccgcgttggaattctacattgttgtcgtgtactggattaggaatatctgcataagttacacggggcatggttgaacgaattacatccttagtgatatcaccacgacggaaatgttgaggcgcttctacgatagttttctcaatcttattaacatcagtaacgtagtttacgtgcaacatcaattgatagcgattaactttagataaggcttttaactcggcttcactggcataagcattaccgatgattacatcatcaatcaacccagaagcccagagatgcattgcttgcacatcaattggtaaattacggtcttgctcaagcgttggtaaaccatcttccacgttccaaggtcccatttgacctacttgacttgagacaaaagcggctgaatgaatgccaaactttttgaagcgttcagaacaagcgataaagaagtcgtaaggtaagccagtaccgcgttgaggataaaaattgtgacagccataaataaacggtgtattagcttggtaagaaataatattgttaagatagtcaacattattactcatgttgagttcaatgattagaccatatgggttgtaagaaagcattgcttcaattgcaccatcaaatgttgtgtcaagacggatgcctgctgcaccaatatcagcaaaaaatttcaggtcatcatagctgacacctagttgtttgaagattgcaggattaacatctaaaaaagtttgaaatcccaatttattgccatattcaatgatttttttatacttagctttggtttcttcagggctgccttgtacttcaagcatactcatgaagatacgagaaaagccatatttgtgagctaagtccagatagtgagcgttgccttcaaatttgctgtggcctggataaattgacagacctaaagatctcattgtcataatagtacctcatttttgataattgtctataccaattatatgatattttttattgtaggtctagtccaaagtgaccgagatagtttatattttggtagggtgtctcgctacgtttttaattaaacaggtgttatatttaaagtacagggtatgtgttaagaaggagaaattaagatggataattttgatcaagaatctggtcaacagcaatatgctaatgattcaggattaaatgttttttagcaaaatatatggttatatggccttagcggttttcgtttcagcaattagtgcttatttgacaatgacggtttttgcgggacctatctctgcctttattgcacaacaccaattgtttacggcgttacctttgcttttattgcaggtgcatatagtggacaaaatattgcttcagcatttgtagcttcggcaaccgtctttgtaacaatggcgattttaggaacaattaccaaaaaagatttgagtcgaatagggtcttatgcttctgctgcgttaattgggttgattgtagccatgttagctaatttgtttttacataatccaatcattgactacgttttttcgattattgctgtgattatatttactattttaactgcgtgggatgcacaaagaatgaaagatatttatttacaatatggtgatgatctttcaactaatgggcttgcagttttaggtgctttgcaattatatcttgattttgttaacttgtttttacaatttttggatatttttggtgcaaatgaagataagtaattaaactagtgagactgtaaaatagtttgtgtaaggatgaatgattccttaaatttatttctttaaacattagaaaaaggagttcctttctcgtatgattggtttgaacaaaaaaacacatacagaaagaagaactccttcatgaatgattttaccaaagattttgctcaagctctattcaatccagacaaaataaatgatttattgcgcaaagagctacaacaggctgttaataacttgttagaagctgaattgactgcctttctgggctatgatccctatgccagaaatggctggaatactggcaactctagaaatggtgcttatttccgcaaagttgatacgcaattttgcccaattgaagtgcaagtgcctcgggatcgcaacggtcaatttcatcagcacacgctgcctggctacaagcagcactcggatatcttggaaagcatgattatcaagctttactccaagggcgtgaccaccagggaaatagccgatctaattgaaaagatgtatggcagccattacagtccagctcaggtatcaaatatttccaagcagatgattccaaaggttgaggcttaccacaaacgcaagctaagcgacaagtttttctgcgtctatttggatgcgacataccttcctttgcgccgagaaacatttgagcgtgaagcagtctatattgccattggcatcaagcctaatgggcacaaggaggtcattgactactgcattgcacctagcgagaacattgaagtctggacagatatgcttcaaaacatgaaatcccgaggcttgaagcaagttgagctctttctttctgatggtgttgttggcatgaaagcggccttgaccaggacttatcctaaagctcattttcaacgctgcttggttcatgtcatgcgcaatatctgtgctaaagtacgcgtcgacgatcgtgaaaagatcatgaacgaattcaaacaggtgcatcaacagacaaacaaagaagaagccacagctgtcctgcatgacttctataccaaatggggcaaggtttacagccatgttatcagaagcttgaaagacatagaaccagatctgctggtcttttataactatcccaagcagatcagagcttcaatttattcgactaacatgattgaatcatttaacaatgtgatcaagcgcaaagctaagcctaaggcagagtttccaactgaacagtcgcttgatgcttttattggcattcaggcaatgagctacaatgaccgttatttcaatcgaattcataaaggctttggtcaggttcaggacaccttagaatcctactttgattaaataaataattaaaaaatcaatttacgagaaagaactatttacacaaaagatttgacagtttcaaactagtttctaataaacgtaggaacacttcatatataaacgtatactatataaatatagtgacatattaagggagtgtttttatgaaaagatgcaagaattgggttgtgactattgttgcatttctgatgttagtgggagaaatcagtgttctgcctgcaaatttgcaggggtcgacatcagttgttaatgcagctattcatcacagaaggagaaagcatcaatatcgtgataaaactaagatttataccagtaattacagaattgttgataataaacgatcaaaaatctttcacgtaatgcgcggtcataattatcgaatgaatcgtgaaaatgcagttttcttcaagagtaaagcagcagcacgtgcagcaggatatcgtgaatcaaaaagataaattaaaagacttctaagagttcaaagttcctagaagtcttttaatttataaaatttatggtaataatatacctgtttttcatcacaggttggtaaattaagtcgattattatggcagcaataatcgctacaattacagtaattgctaagttttgaatggaaatctggaccattgcccaaccacaaagagctaagataaaggtcaatagaacatctgcaatttgaacactaccaaccaacttggatgggtaatcttgccaaaagtacttacgagttctagtaatcaaaacaatcaacattgcgctaagaactaggtatacgtaaaccatagtagaaacagcaccgtgactccaaccgtgtgtgtttaagaaccaaacaaacccaataccaattaaagtccaaccagcagctagtgaaaaggcgatcttagcaagcttagccatattccagttttctggcttataagtaatgtgagtcctgtcagttccaatcatcatcgtaaccatattgttcataatggtatagataaccattgcattcaaggccattgggatgtagtcaaagaaaagatagccaaaagttaacagcatcgttaattcagcagttctagcaagcttggttagtgaccaagtagtcattctttggtatacgcgatgtccagcgtctaaaattttaacaattgagcctagaccatcgtctagtaataccattttacccgaacgcttagctacgtcagcagcatttgaaactgcgattcctacttcagcttgttttaatgcaggcgcgtcgttaactccgtcacctgtcatccctacgatatagcctttttcttggaaaagctttaccatcttgagtttatcttctggtaaaacatcagcaataccggccaaatcattaatatcagtattttcattgaaatcgtgaatcgaaattactttaccagttaaatcaacttgttctgccactgcagcagcggtcttttgattgtcaccagttaacataattgggcgaacgccacgtttcttgagttcagccaaagctgctttagagtctgttctaactttatcttgtaagatgaagacaccagctaacttatcgtcaatcaagactgccactgagcgtcctgccttgaaattaattccagaaatttcttcatcggcatgtttatcgatcaaagataattgcttaaatgaaccaagctttacattatgtccagcaacatcagccatagaataaccagtgtcagaagtaaatggagtaaagttttcagcattcatgactggaatgttattttctactaagtattcatcgattgctgtatcgataataccagcattacgtttatcagttgcggctccagctaaagcaagcacgtctttgtcaggcaagtcacttagatcagtccaagcggctacggcagttttgttttccgtaattgttccagtcttatcaagtaaaagcaagttcaagttagctgcgtcctgaattccagttaggtcagaagtcaggactccttctttacttaagcgggttgcttcaaatgagttggataaagcaaaagttgatggcattgctacaggaattgaagcaataaacatcattgccaggaatggcaacatattaataaaggtattgaaattaccgcctttgaagaaggaggcgataataataactaaggttaaaacaccatctagtaagcaaaggtagtagataatcttagtcaaaagttgttgtaagtgaccaggagcagcggaattgttgatcaaattaatcgtcttaccgcttctagaatctttacctgtagcagtaacaacagctaggccatcaccttcaacaactgtagtaccggcaaaggcggtgtcatcaattgctttcttaactggtttagattcacctgtaattgagctttcatcacaagctaagttaccgtcaacaattttaacatctgctgcgagtacgtccccgcgtttaagtgagattaaatcgcctttaactagttgtttagaatcaagtttgatccacttgccatcgcgttcaactgatacagtaggagtcaacttgtgtgaaatattatttaaaactcgtcttgattgctttttcttagatgcaccgttaaatgcagcaaataaaagcatcaacaacacgaataatgattggacccatttgcccaagatacattctagaattaaagcagcttctagaatccaagcggataggttccataacttagacaagaactctttaaagaaattgtattcaggctctggtacttcatttaagccatcttcttttaagcgcttgtctgcttcggcttgagttaagccgtgaaatttatcagacattattttccctccaaatctaccttaataaggtagcacagatattgctatgaataaaatactaaaatacaatataagatattaaatattttaatatcactatcaattgaaataaaaaaaggataaataatatgaatctaaaacagttacgttattttctagttgtagcagaagaaaagcagattacagcagctgctaagcgcttgtatattgcacagccaccattaagctatcaattaaaacaattagagaaagagttgggcgcgcaattatttaaaagaacggcacatggtattgagctaactgatgtgggacaaatttttcaaagctatgccaatgaaattatttctctagctcaaaatgctgaaaaccaagtacataagactatttccggtgaattgggaacgattgcaattggaatggcatcttcctcaacgggcttgataccaatgaattcttttaatgaattacgaaaatattatccggaaatttcttttgatatttatgaagataatacttatggcatcctggataaattagaaaaaaagacaatcgatctaggcattgtacgaacgccttacaaccagacaggtttaaatactaagactttaacaactgaaaaaatgatggctattagtgtagacccagattttcagccaaaaaaagaattacgcattaaagatctagcagatcagccattgattatttatcgtcgctttgaggatatttttaatcaaacttttgcacatcatgggcttaaaccattttatgcggttaagtgtgatgattcacggacagcaattacttgggccaagagaaaaatgggagtagcgctagtaccagaatcaattgcgacaacttatgcccaagaaaatatgatcgcaattaaacatgctaattggataacacatttgcagctggtttggcgtaaagatcatcaagttacacctttaatgaaaaaaatcattgctgcaatatgataatactgtaacttttacctaattgatccataataaatgtaaacgggtacaataattaatagaaggtggttgaatgtcgagtccgattcatgtttattcagaaattggtaagttaaaaacggtgatgttacatcgaccgggaaaagaactagaaaatctagccccagatattttgcatcgaatgttgattgacgatattccttatctgaagattgcccaagaagaacatgatgcttttgcgcatgtattgaggcagcaggggatcaaagtattatatcttgaggatttattagcagaatctttaacagatgagaaagttcgtcgggcattcttagatcagttactggatgaatcaagtattaaaaaacaggatcctttgcatcaattattgctgaactatctccaagaattgctaactaaggaaatggtaaaaacggtgattgctggaattagaaaaagtgcgattcataattctaccccatctttagcagatttggctgaggacccagattaccctttttatcttgatccaatgccaaatgtatattttactcgagatcaacaggctgcaattggttcagggatgaccattaaccggatgactttcagagctagacgacgtgaatcattatttatggaaacaattttgaaaaatcatcctgatttcaagaacgcaactattccagtttggcgtgaccgttatcatcatggtcgccttgagggcggggatgaactagttctaaataaccatgtgttagctgtaggtatttcacaacgcacttctgcaactgcaattactgacttagctcataatttatttgatcattcaagttatgatacgattttagcgattaagattccgcacaatcatgctatgatgcaccttgatacagtttttacaatgattaattataatcaatttacggttcatccctttattttagataaagccggcaaaattgatatttatgttctacagcccgatgatcacaacggtgtaaaaatcacagaaaagaatgatttggtgcaggttttgaaagaaaacttacatttaagcgaattggatttaattccaactggtggtggtgatccaattgccgcaccacgtgaacaatggaatgacggctcaaataccttggcaattgcaccaggtgaagtcgttacttatgatcgtaattatgtatccaatgatttgctaagaaaacatggcatcatcgttcatgagattcggtctagtgaactctcacgtggtcgtggcggtcctagatgtatgtcgtgtccgttgattcgtgaagatttataagaggcaaaaaatgaaatatttacaaaatgtttttcaaggtagaagttttctcgattgtaaagactatactccagctgaaatttcatatttaattgattttgcattacatttaaaagaacttaaaaaagagcatatcccacatgaatatctgaaaggtaaaaatattgcactactttttgaaaaagcctcaactaggacgcgatctgcttttgtagtagcttgtaatgatttaggtgctcatccagaatatctaggcgcaagcgagatccacttaggtaaaaaagaaagcgtcaaggatacggctaaagtcctaggctcaatgtatgatggaattgaatatcgcggttttgctcaagaagatgtagaagagctggctaaatattctggcgttcctgtttggaagtgggtgatggccgcgataatgttgccgacagtcttttagtttgtggctcaatgttaggtgttaatgtacatattgttacacccaagcctttgtttacacatcctgatgtacaaaaaattgctcaaaattttgcccaagattcaggttcaaaaaatttgatcacagatgatattgctcaaggcgttaaaggagccaatgttgtttataccgatgtttgggtttcgatgggtgaaaatgattggtctgaacgaattaaattattaaagccatatacggtcacaatgaaaatgatgcaaatgactggtacaccagatgaccaattgatctttatgcattgtttgacagcttttcatgatcgaacaactcaggtgggagaagaaatctatgaaaaatatggcttaaatgagatggaagtaactgatgaggtctttaattcaaagtatgcttggcaatttacagaagctgaaaatcgattgcattcaattaaagcagtgatggcggctactttaggaaatttatttattccgattgcctgtggcggtggtggcatccttgttattgtgaaagatgggcatctcagaggtgttgccggcgtaattcataaagatttttccgctgctaaaatggcagaagatatcaacgctgatgaattagtaattctaacaacggtggatcatgcatttttgaattatggcaaagaaaatcaacaagcaattggtaaaataaaagttgaacagctcaaacaatatctagcagcaggttatttcgcagctgggagtatgaagcctaagatagaagctgcaattgaatttgtagaaaaaacaggtaatttagcaattatcacctctttgagcaatgccaacaaactagcagacggagtcggcacaatcatttataattaactgggtgataaaaatgaatatttttaatgaaggaaaaaagcaggatattgcccaagttttagcagctaaagataggcgagtagctgtacaacataagatttttaataagtatcctaatcaaactctagtcgacattaatatgaatatcccaggaccaatcaagaataatcgctatttaactaaaatgtttatgttgggtatcaatgagctggaaaatgcttggactaacctaggttatcattttaaattggtgacacagcttaatgatgatagtggctgtgaaaacttttatgtattatctttgtcaattgaaaaagtaaagcgctcaacaattgattttgagaatcagatatcattgggacgtctctttgatgcagacgtgttggtaaaaaataaacaagctgcaatttcacgcagagatttgggcaggcagccacgtaagtgctttttatgtgatcgccctgctaaagaatgtgctcgcagccggagacattcagtggaacagatgcaggcatttatctctcagctttatcaagaatacgttgcgtaaaataaaccgggattttatgattccggtttatttttatgaaaaatctagttaaaaatttaaaaaatgaactaaaatagtaatgaataaatttatagatgtacgtataggaataagcatggaattaaagaaaaataagaataatttaaagcaaattacggcattaattcaatatgcatttttgaaaaataatgatttgactaaagacgaaaattttatgagtcgttatgatcatagtacaggttatggctattttgataaggaaaaattagctagctatattatggttaatcgatttaaaagtgatgtttttgggcatcatttaccgatggctggaataggttatgtagcttcatatcctgagtatcgtggccaaggtcatatttcccaattaatgaaagaaattttgcatgacttacataggcaagatattccgtttgctaacctggcaccattttcggagagcttttatcgccagtacgggtttagcaatagtatttatcaaaaagaatatcgctttgatggaagcgcattgcgtagttttaaattaccacgttctggtcatatagtgcgtggcaagtgggacaatttagctgttcaaaatggtgtgattcaactttatgaacgtcaactgcatactgatgatgaacgtaacacggttgtacgtgaggcatggtggtggaatagacttgattcttattatcatcaccgcaatgtagccgtttattttgacgcggatgagcggccaattagttacttgatttatcgcattagagacaatacttttttagctgatgaaatgtacgcaattacgccgcagggattactgagtatgtttggttttatgggttcgcacgcgggcagtgttaagcaatttaaaatgagcgtaccagagaaatcgttacgagctgaactttttcctgaacaaaacgaactccaagttgatttgcgtccttatatgatgagtcgaattattgattttgaaaaagttttggcttgtatgcggccaatgcaagaaggtgattttaatctggaagtcaatagcgatgaacagtgtccttggaatattggagtttggcaattaagtaatcatggacgtaaggtagcggtagaacgtaaggaagatgcattggttgatttttcgggatcaattaccgcgtggacccaggtgctattaggtagactaaccatgaatgctgctgttaaactaggattaattacagattaccgcatcaaaaaattagatttcgttaaaggcgatgtatcattttatgattatttttagttgtgaggttaaaaaatgagtaaagaaaagaaactcaatttaataaaattatttggcattgtagttagtggtttgaatttgatcttttttgccttgatggcacttaataagcatgaagatactaaggataaaagaagagtagcagaagaaggacacgcaccgctggatgaaaaataaaatgacggaattaaagattgcatattttgaccaattaggtcgtaaggaattagatcaggcagtgcagcattttgtgttaaaacatcctaatgtagatgtaaaactacttgcgactagtcatgatggtgcttttgcaaaactgaatgaagatgaagcagacatagcaatcaatgatttgcgtgacgagaatcttaactttgatgaaacagaattgactcaagctggtgtaatggcaattttgcccaagggaatgtatcctaatggcattcaaatgattgaaaaagacgagctcaatgatatgacttgttttattgtggctaaacctgaagaagaggttagtgagctacatttatttaaagatttgtatcaaattggcagtcaattcatcgcttctaactcggtcgaagaagcagcactgttggtcgcctctaggtctggctattttattttaaatgagaatacggctaggttaattaatactacagatttgcagccacttttcttgcttgatcatggtcagttaataaagcaaaagataatggctttttataagtcaaattcagcgttaagtagtgagtttataaagctattgcagcaagaatattaatctgtaaagttaaaaatatcttgtctaagtactataagatactgtaaaatatattatgaaagcggactcatatattttacattctggagatgatttttatgctaaaaagaactttgttacctttaacatcaatggtacttgttttaggattaactggtttggctagtcaagttgagactgttgatgcttcaacttatggtaatggtgtacaggttactattccaaaaaagatgcagggtacttggtactcttatgatcgtaatgcacataatggcacaaagatcacctttactgaacatactgttaatggcaaaccaatatttacccaggaggcttcgacaattagtgattacttcaatggtagaattgctaaccagaagaactttgataaggtaacgcaaaactggatgtctggtaaaactaccaaaatgaagaatgatacattctatgagattgatccgtggattacttttgaaaattggagtctttatcgagtggtaccacaaaccattaatggtaaaaagcataacgtgctggtttattctagtagatatgatggtggtaactacttcagaagcaagaaattagctaaaaaaatgaaggactacaagtttaagaaagttaattacacgttatagttttgtgacatcccttaactaagggatgttttttactaatagacgcgataaaatttagtataataatgacaaaattaattcttggaggagaagttatgaaattaaaacaaacaccaattttgcgtttatataaactagaaactaataaagaggatcatgcaaagttcgttaaggcagggcaacataatatgcttacttctcaagaaaacgaaccaggcacattgtttatgcagacaagtcatgacgaagaaactactaattttgtagtagaatgctatcaagacgaagcaagttatgatactcatgctaattcaaagcaatttaaggattttactgacgttgctaaagatattttaactagtcgagtaaaggtagaattgtttccggaatttatttctacaaaggcagaaaaactagcagttaccggatcaaatgattatgttatttatctgactgaaattggtgtttctttaggtaagggcgatgagtttgctcatgctgtaatgaaagaaatgaaaacggcagtcgaagaagaaaaagatattttggcaatgattgcaggaactgttgccgatcaaccaaatgaatggttagctattgaagtttatcgtaataatgaagcttacaagcagcacttggaaactaagaacttcaaagagtatttgaataatacaaaatattgtgttgaaagtaagagtttacgtaagttgcaaccagatgtaattgttgaccaaggtgcaattttctaccaaccataaagaataagacgaaaagaagaccaggctatgtggagtacataacctggtctttctagttagaggggaaaagatttattaacatatattattctggtttttagtggcgatgttttacctttgctactgctggtttattaattaatactgagctgatggccattaaaccaagcgttaaaaatgatccaccaattaagagtagtttaatcaaggttctcattcctttcatcttaattgatcttataatagcgaaataatattaagaatttatatgtaaaacctaatggattagttaagaaaataaaactagaaaaaaggctggttagcacgtaaaatagaaatagagtcaaagtctagtgcaactgcgcataaaataaagcagtatcgatgggatgctgcttgttttggttaaaaaatagagaatatgcttgtagcccttttcgtaaatagcgttaatgttgtaaaatggaaagtgcattaagtttattaatgagaaaattgatgtattattgcaaaataggccgtaatggccctttttgttgtgaaaaaattaaaagaatataggattggaaatgccaggaatagtagagcaaacattattagaacaacaaaatattgatttaaatgaaatggtaacaatgaatcaaatgattgatcaattgttgcctaatgcaagtaaagaattacaacaaaaactaaagattaaaatttataactttgtgcgtacacgtaaacaaccaagtattactgtgcgaagaagaaaatattttaagccggctgttgctaaattaattattggtaatgtacaagattacgcagatgcaattgaacgtcgtgctaaggaagccccagctaaagaggatgctactgataagaggccagcttctaaatctaagcgggttaagacaattactaagcgtaagattttagctaaagttataaagaatgataagattgataaatctattcaaaagaaattagaggataagattgcttcaattgtgaagaccaactttattaagccagttaacaagcggggaagtttttcggttgaagatggtgaaaaagttatagctgaacttagtcctttttatcaaaatatcaagattgatcaaaagtatcgcaagaatgctgaaaaagcggctgaaaataaggaaacagaaactaaagaaaagcctgagcaacattctaaggatcagaatgaaagtcgtgaaggtcaatctaaggactttgagcgtaagaataatcagaagaatagcaataatcgaaataataataatcaaacgcaaaatcaacgtaagcgacaaaataagcatccttttgagatcagaagagaaaataataaccgctcacgtaataatcagtctaaccgccgctataataatcgaaataattatgataatcggaataattatgaatttgatgaagctagcggtttgcgtgaacgctacaatacagtaatcagaaattacaatcaactggagcaaagatataatgctttgcaagataaatataatcaggctttagatgataaagctagattgatcgaagaaatgggtaagaagaacgaagacttacgtcgtgtattgatcgacgttttgcgaaaaatgtagtttttggtaaacaaagagactagtagtcaatttgaattgattactagtcttattttatgtttatgaaatatgatttagcttaaaaattaaaaaaatatgtgtaaaaaattatttttgtgtagtaagattaaaggatgataaatatttttattaatgattaatggaggagaagtatgagtttaaaagagctatttaaaagcaatgtgtttcgaggaaactgtcaaatcttttgtgtaaatagatttttctcttagattgattttttaatcttttatttaatcaaagtaggattctaaggtatcctgaacctgaccgaagcctttgtggattcgattgaaatagcgttcgttgtagctcattgcttgaatgccaataaaagtatcaagcgactgttcatttggaaactctgctttaggtttagctttacgcttgataacgttgttaaaggattcgatcatattggtggagtaaattgaagccctgatctgcttaggatagctgtaaaagaccagcagatcaggctcaatctctttgagatctctgatgacatggttgtacgctctgttccacttgtcatagaaggcgtgcaagactttgatcgcagcttctttatttggctgttgatggatttgcttgaattcattcatgatcttttcacgatcgtcgacgcgtactttagcgcagatattgcgcatgacatgaaccaaacagcgttgaaaatgagctttaggataagtcctggccaaggctgttttcatgccaacaacaccatcagaaagaaaaagctcaacttgctttaagcctcgggatttcatgttttgaagcatatctgtccagacttcaatgttctcgctaggtgcaatgcagtagtcaatgacctccttgtgcccattaggcttgatgccaatggcaatatagactgcttcacgctcaaatgtttctcggcgcaaaggaaggtatgtcgcatccaaatagacgcagaaaaacttgtcgcttagcttgcgtttgtggtaagcctcaacctttggaatcatctgcttggaaatatttgatacctgagctggactgtaatggctgccatacatcttttcaattagatcggctatttccctggtggtcacgcccttggagtaaagcttgataatcatgctttccaagatatccgagtgctgcttgtagccaggcagcgtgtgctgatgaaattgaccgttgcgatcccgaggcacttgcacttcaattgggccaaattgcgtatcaactttgcggaaataagcaccatttctagagttgccagtattccagccatttctggcatagggattatagcccagaaaggcagtcaattcagcttctaacaagttattaacagcctgttgtagctctttgcgcaataaatcatttattttgtctggattgaatagagcttgagcaaaatctttggtaaaatcattcatgaaggagttcttctttctgtatgtgtttttttgttcaaaccaatcatacgagaaaggaactcctttttctaatgtttaaagaaataaatttaaggaatcattcatccttacacaaactattttacagtctcgtttcgagcctgcattattatcttattgtatgttttatacgcattatttgggagttttagtgaatatttatttaaatatgctctgaattcaattactgctggtaattttaatacatatgtttattggcaaataatgcagtttgttttagcattattcacttcgttgcttttaccaattactaccgttgttttcactaggcagacgcaaaactatctgcataaaattcggcaagaaatcatgcatcattactattatgaaaaaagtgatgaaaaagtctctagtatgcagaaccgattaacagccaatttaaaaatcttatcagatgattatgctacaccttggattactatcttaagtggggttttagagattgtgattgctattgttttactagcaagcatgaactggattctaattttggttactgccattttagctgtgattacactttttgctcctaaaattatggagaagaaaacatcagctgccacagataaagtaaataaaaagaatgaaaagctgttaaatacaattgctcattggcttggtggattgcaggaactacgtcgttatagtgcatacagtcgtttggttaagcaaattcatcgatcaagtagtgattatgtggacgcaagtaagggtagtgcaaaattaagaagtgtaagttatttgattaatgcttttagcaattcaattgcacaaattggtatgagctttattgctggaatcatgtttttgcttaatatgatttcattcggtgattttgcagttgctagtggttttgcatttacgattttttcagcaatttggaatattactcagtcgttaacgcaagttaagtcaactaaggctttacgcgaacagattaccgatttaagaaagcaagttcctgatgaaaataaagataaagtatcagcctacggtcttaaagtttcaggcttgtctgtaaaatacgatcagggggaaacaattttttatcctgattttacaataaaaaaagggcagaaagttttgcttactggcgattcaggaacaggaaaatcaaccttgtttaatgttttgttaggtaagctaaaacctgaatctggtacggtgacctatctagatgaaaatgaaactatcattcctgaaggaaaagctagaattggcaatatgccgcaaaatccagtagtttttcccgcaacgatcaaagagaacattacaatgtttaacgaaaatttgcaggataagcttcaagatgttgttcaagcagttcaactccaatccgacttagccaaaatgccagatggtgttaatacaacaattgatctaaaaagtgaaaatttgtctggtggacaacggcaaaaagttgttttagcgcgaacggaaatacacgagcaatcgtttgttttaatggatgaagtaactagtgcgatcgatcaaaaagctaccgaaaaaatcattgatgaattgctcaaaacagatcaaactattttgatgattgctcacaactttacgccagaattaaaagcaaaatttgatcaagaaattaaattaaaaagtaagaaaggggataaagtaagatgaatttgaaagcttttattaaaaccaatccagttcgtttctggttaactgcaattggttggattattattcctgctttatcaattaccaatacttacgttgtacaagaagagacgaatatccttttaagtcgtaattggactaagtttattttaatcaatgttcttgcttttctgattatgttagttgactatggtgtgagtgctttagttgattatcagcagcaggctcaggtacaagacttaaatgatcaagttagagataaaattgttaagcgatattattatgacgggaaaaagcatactgttgcacagatgcatagactgtaaaatagtttgtgtaaggatgaatgattccttaaatttatttctttaaacattagaaaaaggagttcctttctcgtatgattggtttgaacaaaaaaacacatacagaaagaagaactccttcatgaatgattttaccaaagattttgctcaagctctattcaatccagacaaaataaatgatttattgcgcaaagagctacaacaggctgttaataacttgttagaagctgaattgactgcctttctgggctatgatccctatgccagaaatggctggaatactggcaactctagaaatggtgcttatttccgcaaagttgatacgcaatttggcccaattgaagtgcaagtgcctcgggatcgcaacggtcaatttcatcagcacacgctgcctgactacaagcagcactcggatatcttggaaagcatgattatcaagctttactccaagggcgtgaccaccagggaaatagccgatctaattgaaaagatgtatggcagccattacagtccagctcaggtatcaaatatttccaagcagatgattccaaaggttgaggcttaccacaaacgcaagctaagcgacaagtttttctgcgtctatttggatgcgacataccttcctttgcgccgagaaacatttgagtgtgaagcagtctatattgccattggcatcaagcctaatgggcacaaggaggtcattgactactgcattgcacctagcgagaacattgaagtctggacagatatgcttcaaaacatgaaatcccgaggcttaaagcaagttgagctttttctttctgatggtgttgttggcatgaaaacagccttggccaggacttatcctaaagctcattttcaacgctgtttggttcatgtcatgcgcaatatctgcgctaaagtacgcgtcgacgatcgtgaaaagatcatgaacgaattcaaacaggtgcatcaacagacaaacaaagaagaagccacagctgtcctgcatgacttctataccaaatggggcaaggtttacagccatgttatcagaagcttgaaagacatagaaccagatctgctggtcttttataactatcccaagcagatcagagcttcaatttattcgactaacatgattgaatcatttaacaatgtgatcaagcgcaaagctaagcctaaggcagagtttccaactgaacagtcgcttgatgcttttattggcattcaggcaatgagctacaatgaccgttatttcaatcgaattcataaaggctttggtcaggttcaggacaccttagaatcctactttgattaaataaataattaaaaaatcaatttacgagaaagaactatttacacaaaagatttgacagtttcgtaatcgggactttctgtattgaaaaaatgaagagataatttgttattgatctcaatttttaaatcttttttgttaacggtaagcgtataacagtgtcgtttgcagataaaaccatttcttaataaaaaatctacgattggattttcatttgaatcaatcatgacttgcaatgcttggtgctctgcttgaactatttttgaaaatggaatatttacagagtaatcacttagattgaattttagataaatatatttgttatgaaaaagattgtgataagtagaaatagtgcctagatgcttatcgttatcagttactttgtagattttaggagatattttttcaatttttgtagtcattttttatccttttgataattgaaattaatttttgatcggttccgtttttaattatgaagttataaatcggttcataattgagcacagggaaaataagatcaggatcaattttaggtataatgtcaatcattgatttcttactaattacgttgagatttttaacttcttgagcatttcttatctttctttttgcttgtgaaggaggataaccttgtccccaaggctgttcaaaaagattttttatagtctgctcaaaattgatttcaccactccaaccccaattaagtcctagtggaaaggagacaacattgccgttattgatatgaccaaaaagaaaagcatcttgtggagtggggatataaccacattgaatattaggaaaagtatttcatgcaagcatcattccttgtccagaagtacatcctgtcacaatgaagtcagtcgccttgctattaattaataatgcgacagctagggaaacttgcacgtaagatagactagccgaactatcttgataaataccaaaattgaatacttgatcattggatcctacagattctttgatatacttctctaatatgaaatttttacttttttgcgatgtagcttgaataatacctattttcatatttttaacctctatagtttattttttgaaagcgctttataatattatataggaagtaaagtaagaaggtgaacgtgatgaaaaaaattattgttggaactcctgttaaattgagccatgttttaatcggtatgattgtggtagttttactttcactatttttgacaggatttggttatcaagcttggtggctattccttattgtactaattttaggtgtatttgtaactttacctacttgttttaatccgtattggcagattagtagcgaaaatattacaattataaattatgatattaacgatgtgataaaattgatgcaactgctagggttacataaaaagagtaagcaagttattaatttatctgatgtaaagaaagctgccgttgtctatcgtaaaaatgtacgtcttagtcctattgactttaatcctgattatttaaatttgattttggatttaggtaagggaacaaatatgactttgacacttggaaatgtcgactatcagcaactaaattcgattatgggtttgttacaagataagaatattgtagtagatgataaacaaaatattttgcaacttttaagagaaaataaaaacttgtttaaccattttcacaagaaaggctggacatcgctataaatggataaagagcaaataattagaaattattttcgagcatggctaagtcctaatcttgaagtagtccaaaatacatttgacgaaaatgctatttatagtgaatgctatggtccagtttacagaaataaaaaggagataatatcttggtttgaaaattggaataaacaaggaaaagtaattgcttggccaatagaaagactcataattaatggtgatacgagcattgccgaatggcattttaaatgtaattatcaaggaaaaattagtgaattcgatggtgtatcaattatagaatttaatgatcaaaataagataatttctgtaaaagaatatcaatcaaagtccaaacattattatccctatagtaaataagacttttaactgttaagaggttaaaagtcttattttgaatatgaaatcttttataaactaatttctgtggaaaaaattaccaagccagcttcgtttctttttagcctcttcttttcgtcgctgttcacgatcttctaacattgccttagctagcatatcaactgtttgagtcaattgtgcttggttatctctttgttgcttatctctaaatgaactactgttttgatacttattcattaacgtatcatcatcaagccatttatcaaagttttcaacatcaataataaaaccggtgctagtttgttgcgatgcaatgtgatattttctaggcaaatatttaaagtagcgatcaagcatagtagaaccgctgtttttcgccgtttgatcggagattttattgaaaagttctttattgatttgggcttttagccggtcatcttgtttaataaataagatatcgcttccgatttttgcttgattgattaacattccccaatcatttcgaccaacaaatagggagtaatcgtaattttcttcaaaatatttgctgacttggttatacatatcaaatttatcaagtgcagtttttaaaacatgcttgattggatataagaagtctctttcaatcttctgcgcatcttcaacactaacgttagtaaagaattttgctaattcaacttgacaatatttaaaaagatcatcatttgcacgactaaataagctagttaatgcagcattacgttgatcactttcacctgaaaaagtagattcaaagcttaaataccataaacgacgcataatttcaggctttagagaaaattgtgatttaatagagctttcttgtctattcatcgtgaaaatgaatgctggtgagggatgagttaaattacgattgttagtaacttccttgatgaatctttcaaagtaagtacgggttgtaagctcgggactgacatcatcaatcattaatggacttacaggaccatttgtatatacatagtcacttagcgtgttggtaattgtcatattgatattactcttgccaagggcataattctttggatccatcattccactatctaagaaattatgagcaccaattaatttagcggctagtcttttccctagggtggacttaccagttcgaccttgtccgattagtgctgtagcaataggcacgtcttctctagatacattgcttccagataattcatataaattgcggattttccaaagccatggtgattcatatagaaacagcataaagtcacaagcttgccagccttcaccaacttctttgtaagtattatattcatgagtgatatcacagaaaagttgaagcgcattttttaattgcccttcagttaaatcagaagtaataacttcagaagggatgttatcaccaattttagaggcttggaataattgaccattattgtaaaactgaacaggaacagggaagagatcttcttctttttcaatttgtgatgtatctgcttttgcctttttgtcttgacgaataatgtgctgagtcaagctatataaatcttgcccgattgtatctagcttacgtcttttattgccaccttcaccaaataaagtaactgtttgagaagcaacgagtttttcattttcagataatttctttaattcatcatctttgctgtagtggtcgcgatacttttttatctcttcagctgggagaataattatgtctttaccagttgaattaggactgtttttgatttcaagagaagaatcttgcattacatgaatgcgaagatcgtctttatttttgtcttctaaataaccagatagttttttagcattaatataagttgtagcctgattaaggttatcttgaaacatttgttgatagcaattgaataatggatcagaagtattgccgtaatcccaaactaattgttccatatttttattaacagccgtatcggtaagattcattgaacctgaaaaggcagagtacttgctttgattttccattaaataaagcttagtgtgaatcaaattctgtttggtgaaaaaaagctgtaaactaccatctaaaatacgtttagtgaagggactatcttggtgttcgtagctatattcaatcaaatcacgacgtttatttaaaatttggtcaattcttttgccaattgaatttgatccattatcggttagtccaagaattagtgtgatctggtcaaaacgtggtataagattttgctcaataaatttaatattagaaacaaaggaaacgcctttaaactcagagaatttatttgactctctttgaaaatcaactaattgccaaaaatcggcattggaaattagtttttgatcagtatgatttagtatttctaatcccatataaaatcctttcgtgagtatacaaacatttgcttttagtgtatcgtgaaaaattggattagagcaaggaaaagttaatttattattgaatttatgaattagattaagtaaaatctgattcaaataacggaagtaaaaatataataatatgttatcgctttggagaaaattatgacaacagtatattttgtaagacatgctcaacctgatttatcagttcatgatgatttaacacgtcctttgacagaaaaggggttgcaagatagaaaaaaagtaactgattactttagagataaacacatcgaccaagctttttctagtccattcaagcgtgcaattgatacaattcaaccagttatagacgagaagaaactaacattatcatctatttctgactttagagaaagaaaaattggtgatgagtggatttctaattttcatgaatattgtgaaagacagtgggaagattttgattataagctaagaaatggcgagtctttaaaagagacgcagaagagaaatgttgctgctttgaagctagttttgtccaaatatcaagatcaaactatgattattggtggacatggtacagcaattggatcagtaattaattactatgatccaagctttaaatatgaagcctttgctatgatccagccaaagaatccatttattgtgaaaatgaactttgatggagaaaaatatttggagtataaagtagttactttttagtaaaaagataatctcataaagtaaaaatggtaaatcaaggtactaataaccagatttaccatttttttatttgttatattatagcttatgttaaattttatcctgagcaatgaaattatcataaatggttttgataactacttcttcatcttgccgtctggtaccaatcataattgagatttgggatgcaccctggttaatcatttgaatggagatgttctttttaccaagagggtaaagcaagctagcacataaagtcagcttgtccttcatcccttcacctaccaccattgtgattgcataatcatcaatccactgcatttgatcaggatttagactagtttgaatttcattacagataacatcaattaattgatcagttaagacatcttttttgaaaataatggtaatatcatcaattccagatggcatatgttcatatgaaacatgatgtttttgcaaaatttccattaacttcaaggtgaaaccagcacctttatttaacatatattttcttaaataaagggccgcgaagtttttgcctccggcaatacctgtgattgtgtgtttaggtataaagccgtcctctggtacgatcattgtcccaggtttttctggagcattagtatttttaacattgacaggaatttcgccttgaatagcaggaattaaggcttcatcgtgaaagacggaaaatcccgcataagatagttcccgcatttcttgataagtcattcttttaattggcttgggctgatcaacgatatggggattggctgaaaaaatagcatcgacatcggtgaagttttcataaagatcagcgtttaaccccctagctagaatagcaccggtaatgtcagaaccaccgcgagagaaagtagcaatatgtcctgatggtgtaatgccatagaagccaggaaaaatgatcttttcatcttttgcagccttaattctttttaagttcacataagtttcaggattgacttcagcattattagaagtgccagtgacaattaaacctacatcttttggctctaaaaatcgtgctttaattccttgatgatttaaaattttagcaatcaaaattgcattaagacgttctccgtgtgctttaaaggttgccatgcggtagtcattattagggtaacttagcttcggcaatgtaagtagaagctggttaatatcctctaattctgcttcaggcagctcaaaatattgggcaattaattcataacgcttaaaaatacgggtagcgatgtcttgataattattactcctcaagctcatatatgcgtaagtgatcattagatcggttactttaatatcatcctcagttcttttgcccggtgctgagactacaacgacttgtctttcgggatcggcattaataatacttagggccttatctacgctattacctgaggctagggaagaacctccaaatttaacaactttcatatctatttttccttaactattatttcaaatctaaaattgaactgatttctttttccatatcatttggttcaataattttttcggtcttgggttcacgatcaaaaagggcacgcacaccgattgataattgaccgcctaattcatcatgcaattctttaattgcaccgacgccagtttgcatactaggaccaccagtgatggcttcatacaccgtttctgggaacttatatggactggctgttgaaacaatgaccattggggtttgatcgccggtcttcttttgatattgatttgctacaaaagagccaacagcagtatgtggatcaattacatagcggtcataattgtagacccgtttgatttctgatttaacctcttcttctgttgcaaaaccagctgcaaaatttttttgtaatttagtgaaaacttcaccgctaacttgataatgaccgcgttgagtcaattgattcattaaactagcgacttcatagttattttcgccataaaggtcaaataaaagtcgttccaaattgctggaaactaggatatccattgctggtgcattggttaaatggaacttacgtcgcttatcgtagacaccattattaaagaaatcagtcaatacattgttttcattagatgcacaaatcaactttttaataggcaaacctaatttcttagcataatatccagctaggatgtcaccaaagttacctgttggcacagcaaagttaacttcgtctcctagtttaatttcttgtctgcgtactaattgtccataggtgtagaggtagtaagaaatttgcggaaccagacgaccaatattcatcgaattagctgaagaaaattgatagccattagcattaagtcggtttttgaaagaatcattgttgaagatttttttaacttcagtttgagcatcgtcaaagttacctttgattgcaattgcacgcaaattgttgccgcgttggctgagcatttgcttaagttgaacaggactaacgccaccttcaggataaaagactatgacatcggtacccttttgattagcaaagccacgcattgatgccgtaccagtatcgccagaagtagcggttaaaataataatatctttatcaatcttttcaatttgaacagctctggtcattaattgtggcaacatttgcaaagctatatctttgaaggcaagggtaggaccgtgaaaaagctccatgtaaaaatggttatcgtgcttttcgattggaacaatgctgcgatcatcccattgttcactataagcgctttgaactgcagtggtgatttgctccttagtaaagtcatcaaagaataagctaataaccatggcagcgatttgcttgtaggaaagtttggataaatcttctaacttaaaattagcttgaggaaaggcaacaggcacgtaaagcccaccgtcttgagccaagccttgaataattgcttgaggtgcagttaaagtgttttcttttgaacctctagtactacgatattgcataaacaatcttcctatcttatgaaatattaatattataactattgtaccttgattagcacctatgatacaatcgtaaaaataagaaaatcattaaaaagaggataagatcaaatggccatcaaaattgcattgcttggattaggaacagttggttcgggtgttttaaaaataattaaaaataataaaaagaagattagacaaacaagtggtgaagaaatcatcattgaaaaagctctagtacgtaatccagaaaaacatcgtaatttagctaacgaagtgatgctaactacagatttcgattcgattttgcaagatcccgaaattaaaattatagttgaattaataggtgggcttcatcctgctaaggaatatattactgcagcaatcaatgctggaaaaaatgtagttacggccaataaagacttaatggcaacttttggttcagaattgattaatttagctgcaagtaaaaagtgtgatttaatgtatgatgctagcgttgcaggtgggatccctattttgcggaccttggctacctcttattccagtgacattatttccgaaattcaaggaattattaatggtacgacgaattatattttgtcacaaatgggggaaaagggactaagctacgaggaagcgctgaaaaatgctcaagagctgggctttgcggaggctgatcccactaacgatgttacaggtaaggatgcagcatacaagattgtaattttaagcaagtttgcttttggtactaagattagtattgatgattttactattcaagggattaataatctaaaggattttgacattaaacaggctcagaagttaggctatgtcattaagctgattgggattgccaaaaatattaatggtaaattatttgtagaagttgctccatgtttgttgccagaaaatgcgattatggcgcatattaaaaatgaactaaatgctttacaaattaagagccaaagcctaggaacagcagtattcacaggcccaggtgcgggtagctctgcaacggctaattcagtcatgagtgatgtgattactgaaataaaaaacgtagtgaaaaagaccaccggtcagccatttagtaatttctcccatgttatgcaattaacaagttcggaggatgtgaagtattcctattatttatctttcgaagcagaagagaccttgtttgatttgagtaaattactctctgatttggaaattccggttcgtgagattaaacaagtacaatcaagaattgtagttgtaaccgaaaatattagtcgacagcagctacaagatttagcgattcaagatcaatatttaaaagctagctataagattttgcagtaaaggaagggaaaaaatgattattaaagcaccagcttcaacggcaaactggggtcctggctttgattcacttggcatggctgtttcactttatttggaagtagaagttttaagcttagccgatcgctttcaggtggatcatgtgatgaaaggaattccacatgatgaaaaaaatttaattgttaagactgcactaacagtttatccagggttaccaccgcttcatttacgcgttaaaagcaatatcccattggctcatggtttaggtagcagttcaagtgctatcgcagccggaattgaattggctaatcaaattggtaagctgggactatcagatgaagaaaaggttcaattaggagctaaaatcgagggacatcctgataatattgcaccgactattttgggcggcttggttgttggtgctgaagttaaccatcattttgatgcagttgaagcaccacttcctccatatgcgttggtggcttatgtacccgattataatttggaaactaagacagctagagcagttttgcctaaagaattagcttttggcgtagctacgcatggctcagcagttgctaatactttaattgctagtttgtttgctcaagactaccctaaagcaggagaattaatggaacaagatgtattccatgaagtttaccgagaaaaactagtgccagaacttgtaaaagtgcgggaggtagctcattcaaaacatgccttggcaacttatttgagcggcgcaggttcaacgattatgacgtggattgaagataaacatgtagctggatttttgtcgggcttacgtaaacatgatttaaaagatgagacattaatcttacatcctgatgaacacggtgttcaaattatccaataaaaagactgaccaagcggtcagttttttagtcgtcaaaggttgcagcaaaactatcaccatcgattagcattcttttagcattgacagcataccaataaggaataacttcagtgccattttcttgctctaattcacagtcggccatttttaaaatttggtctaaatttttagcactgatgttagggtagagcttcagtaaagcttcttgagtaatgccactttgtttaaagccactagtgggataattggcagaaaaaatatcagaaaaatcatctaagtcatatctaggcttaaattctccatcaaagtatttgatttcgatgttttcaatttccataaaggcaccaagttgttttgccatgtaagggaacttattagctagttgttcaacagtaaaaccattgtttgctttagttcgtgcattgggatgcagtttaagccaagcttcacgtatattatgactatcttttctttcaataagaaggtctttgactttttgaatagctgcattgtgtctgtttacggctttttgccagtctaatcgattaggatataactgtctatagcggacagacaagggatgatcgattgcgttgtagataaaattcagcttgtcagtggtataagaagttagttcatcgtcacgccacattaattcatagtaagaactcatgaaagacacctttctatttggatagactaattaatattaactgaatagtatcattttttgctccgattaacaaaagtgataaaaatgtctatttagattggtcagaagcaaaacttttgttaaaattaatgtgtttactattagtatttgctcaaaggatttgacaaactatggatcaacttgataagttcaaccgacgctacaattttctttcaaaattgtcagctgccttcttttattcaattgcggttgcagttgccttgaactttttttggacgccggggcatatgtactcgtcaggaatcacgggttttgcgcaattaattaatactgtaagtgaaagatatctaccgtttacattatcaacatcaatgatgtactttcttttgaactttcctttatttatattggcttggttcaagataggacataaatttactttcttcaccatcgttgctgttgttctaggttctatcatgatgcacgctattcaaccttggcagatgcacctggacccactggtttgtgcgatttttggtgcttcgatcaacggtattggaactgggatggcattaaagaacggtatttcaactggtggactcgacattattggtattgtaattaggcaaaaaacgggcattagttacggaaaatttaatatttttattaatttgattattatcgctgctgcgggatacatgtttggttggccacgtgctctttattccgccttgactatttttattaatgggcgagtaattgatgcggtttatacccaacaccagaagatgcaagtaatgattgttactcagcacccacagcatattatcgatggtattcaaaaccggatgcatagaggaattaccattttgcatgatgctgaaggtgcatacagtcatattgaaaagacagttttgattaccattattgatcgatatgatatgtatgatattcgccaaatcgtgcaaggagcagatccgtatgctttcatgagtgttagtgaagttgaaaaagtatatggtcgcttcaaggagcaagaaatcgtttaatggatagcccttaaaccttgatatataaggatttataaatgaaatttgaatcctaggggcacttggggagcaaaactattcaaaaagaagcagaaatgcttcttttttatttggagtggctttttgtaattatggctttattattggtctttgttaaaagtgattaaaaatgatattatttcgattgagggatgttgatatatcgtggatcatttagtgtattctccacgagtgtggaggtgatcctatcatcttgaagggcacgggagacaaggcagagtattctccacgtatgtggaggtgatcctactgttaacggtgatgactggtatccagttagcgtattctccacgagtgtggaggtgatccaagtcgttacatcagccaaaagatgaggcttaagtattctccacacatgtggaggctaaatagctgctctgaaaaatatgttctatagagtgactgtttttgtatattatttaaaaatattgttgatggtgcacggagattgcgttcacttatatagtgaaaagatgctaagaaatctaaaatagaatcgagatgaattggtaatctggtaatcgtaagaaggacttagctactaatcgttgtattcaattttgataacaaattaattaaagagcaaaaaatatgaagaattataaatttaataagtttatgtaaaaacagtgtcattaagttaggctattgattttggtgaaaaaacaattaaagcatcatttggctttagacggccagattgatgccctttttggcatatttttctaaatatcattcgcgttacacgtaaaagcgtgtgttgtatatagtgaaaggaggctaagagaatcggagctaagaggtgacaaatatgccgaaagcctataaaattaactcatactggcaaaaatactaaatggtcattaaagttctatcctaaaagagctttgttaactggtgttttgattgtgattgctatagcattatggaaagtgatttttaatggctaaatatacagaagtaaataaaaagtggaatgataaaaatgaggcccgtaagctttacattaataagaggtcaacgacgaaaaactttattttaaatcttgctatcgaagatgatttagaacagattgaaaaggatattgaagaaagacgcaataatttgtaaagaaataaaatgggatacatcaggtaataaaaagtgcatctcatttttatttgtatataatactagttaacttaaaaaagcaataaaattcaaataaaatggaggtatttcaaagaatgacagagaataataaacaagccaaaaccactgataccaaggcaaaacccaacaacgacacagcaatcttcgctggcggttgtttttggtgcatgaatccagcactttagcatctcctccttacgggtacatggctttgagcatatttaactaatacgcagaaatttgaaaaccgaaaaaaaccgaaaactgtttactatacagattaaaaatttaatgactaatttttttatattgatttatattagttacattagaattgttgatattattttcaatagaaaaattctgtagcttattagctaaatcctttttcacttttttagtaatatgcaggtaaattcttctggtaattctggaatcaccatgaccaacacgttgctggattacgtagagaggaacgcccatttcagctaatttagaaacgtgagtgtgtctaaatatgtgagtgacgagtttcttttttattttctgtcttttcatgatacttttaagtactttatttaacttagaattattaaaatagccctcactggttttccagttgtttgtaaaaataaaatcatttgcctttttgtcttcacagtgattttttgcaatagtaatggcttcaggaggtaaggtgacatctctatcaccagcataggttttagcgtttttggtttttatatgacgcttagatggatcaggttcatttctaatagtaattaaagatcctcttacgcgtgcaaaccaagtgccgtctttatcttgtaagatgttctttttttgaattgcggcagcttcaccacatctcataccagtaagatacatccattcaaagaactcttttaaatcaggtcgctttcgctcgtcacaatctttaagtatcctttctaattcattatcgtctaaatatttattttcaatttcttctcgtttttttaatgattcacttttccaactgattttaactttatcaattggattattagaaatataaccgtatttaatgcccatttcataaactacaccgatacatgatttataagagttgacagttgcatttgcatagggatgctcaccatatagcatattgtccaagtacttattgatgaattgtggggtaacattttttgcaattgtatctttaccccattcagaagatattttatttagagtggtttttttacgatagtaggtattgtaagctagctgtttttgagctatttccagatatttatcttttaattctgcaaaagtaatatcagtttctccactttcaagttcaattaacttagtacgaattcttttatcaagaataatttgagcctgttttcgggtttcacgattatttttgccgaatgtgcaactagtttcatgccatttattagttataggatttttatatgattctctgaaaacgtaatttccattcttcaattttctaataaacatgtttttgacctctatttctgctaaaatagagtacgtaaaaggcagtatgtcttttacatacttaatacttatttactgttcaatttttgttcagttcagtttaatgcatctagtatgattgccagatcaaagctaggtgctttccctcacttgttgccagacgggtgagggatttttttgtttcaggtttaacgtcactgtggacgattatctttgttctttccaaaaatctttgtttaaatactctgcacttaattccatttgatcacaaagataatttttttcatcaggatatagctctaagtattgattgatataaatgcctaatcctattctcaattcattgtaggctgttttatcatctgcaatatttaaagcttttgctaaagtgcctaatcgactttttcctttattatttctataatcagccggtgaaatttccattaatgtatgtataactttgttatatggtaactcgtgaattttggaaaaatgattataaatcctgccaccatgtgcagctgtatttctataatcgagatataaagacaacaatgatgtataacccttttcaaaatcaggtaattgttcaattaaagtgggctctaagcctgtcatcattgaaattacatttcttttttgatcacctttgagtagctgataccaccaaatcaaattaccaaaatttaatttcttaacaataatccatgggggaatatttccatgtttatctctgtagtgtttaaatggttcagcatttgaatgagtaatacgtttaagaacatctagtaatacatcaataggataagcttcacgacctaatgagcgataatattgtttttttccagttcgataattcgaccgttttagatagctatcttgcaactcagtatatttttcagatattgtgtatgcaactgcttgtcttaaattagattcaaatatttcaagagcagacattacctgagttcttaaatttctatctaaagtaaataacgcaaatatatgctcaaatgtaacattaggcttgaagacatcagcttcgttgtcttcagaaccaactaaaaaataatctttataaccatacgcgtggtgctagttaaatcgttctagacaatatgccatattataagctaaaatagctatttctagccgttgttgaaaacctactaagctcctggctcgattattctcagcattgtaatagctaagcaaagaaaagtcgctttcgattgttcttctaattgccattaactgatgatcattatgctttttagcacccctcatgtttttacgatatggtgtccaaagcacgtatcccatacgctttagcttggctgctaagtcttttcctaaatagccttcatctcctaaaagataatggttaattggatgagcattgatcatcaattctaccgtctcttttgcatcatgtaccgacgccttagtaactgcgtagtcaagcagatagccatcatcactcactattgcgtggactttgaagccataatagtagatttttttcgtcgctttataaccaatatcggctatgccacggaagatcttaacgtgataattgcgaacaggctgacaaactggaatcggaaaactgtcgataatcaataattctccacctacctttacttcctgattccaaccctgacggatacaacgaattagaggcaagagcattcgagctcgacggttaaaacgagaatgagataagccaacgaagaatttacagaatcttcgttgagattcaattccaatttcagtttgccaaatgagcatcgctaagatagaactatcaggaagcttggtctgatcaacatttttacgatgtttaagtccatcaggcgcataaagcttatacagcgagcgacaaatcacatttaaccgattaaaactaacttgtaaatggtgagaaaaacgattaagcttgagatagttcaattagatcagactcttttctatttaaattacttacaacttgagtctagtctaattggacttttttattaactaaaacgatttaactagcaccacgcgttaaccattaataatttcataataaccatatctacgaagattatttttagcggcttcttcattttgaattagtaatccacgactttttaatatacttatttgttgatcaatagttttaaaaggctttgggttcataaaaacacctcaaacacaaaagggacatgtaacaatacatgtcccttttggtctgatcgcatagcgatcacttaacttgattaactttatgttaacctatgtgacttgttgtgtcaagagacattactttgtatcatttagtatcagatagtgtcatttggtaatatttcgtttaataaggagtgccactttctgcttggtgtaattgatccattgcatatttataagcttcatcgcgtaatgcgccagagtaggtattagccttactcaacttatcactgattgaaatattaggattattaaagtaagctacctctgttgctgataaagttcttttatcatatttttcaggagtagtagcaatctttaattttgaatgatgcttagctgcagtctttgcctttttaattgccttgcggtatttcttagcattgcgtttgttatacattacaaaccacttggtgttgttgggactaactttactcaaccattcatgccaatgatattgtttagttacattttcaggaatagcaaaatctttaggaatagggttaaatgtccatttttgatgcccatttactccatgatagatttttacaactctacctttttttaaggtttttgtagttaaaattactccattgtctgataagctatcgttgtttgcaattagattgaatttagtattcttagttacaattacttttttaggtgagagccaatatacaaagtgcttgggaagttttgcagcttctgcagtttgaggtgtaattggacttgtagactgttttgtatttgaacatattccaattgcacccataagagcaactgatgcaagaccagcgataatagattttttcaatttcttaacctccaaaagtcaggcttaacgtcactgtggacgataatgtataatattgctaggtgattaaaatgttaaaagatattatttatttcacaaaagaagacggtcaaaacaagctactaatggtatcatccattactgaaggagatgctatggcattagaacattttgacaaagctgattatgaggcttgtactaaaatattaggacataaaccccataatatttataaatttattgatggtatagagtttaaagtcctaagatcttggataaagccttagttgctatactggataatattgtcattgatacactacttaacttcgaagcagcaatttttgtttgatgccaaaccttattatctcgaattgtgtctataaactggcaaccgttccaagttaatccgccacatgaaaacatagcaagtgaattgtaagtgtaagtaggtttaccttggataaagccagcatctagtaattgaagcagggtatatttaatatcatccgcactgtaatgatctgacagtacatcagcagataaaaattgctgaagagagataaacctaccaggtctatgttcttgttcaataaataaaagaacatctcttacacaatcatgatttaaccgcacaattaaaactccttacaaatcataactaactttaataactttgcctaagatacgaccaggattttcttcgttaagaagaataggatcgtattttttattttctggcatcagcattacttgtttaccaacgtgtttaatacgctttaaagtggcttctgtgttgtcgtcaactaagactgcagctatctcatcatcttcgacagtaggttgttcacgtactataactgtagctccatcgggaattttgggctccatggaatcaccttgacatcttaaaacaaaaagtgtgccatcaggtttttcattaaataattcagttgtataaccctcaatgttttgttcagctaagataggtgtgccacaggcaattgtaccaatgatagggatgcgaacggcgtgcatccctgattgagagagtggcttcatgtttgtaggttgtttattaactttaagaatatcaggtgattcaatattgaataatttagccattttctcaatatagcccattctaggtattcttgtaccacgttcccaattataaactgcctgttcagatacatttaatttatctgctaattgagcttgggttaaagaatttttagatctataaaattttatattttcagatatagcactcattttctcacctctttgttattagtataacagttttgttagagaaaataacataaagttaggaaaaagttaggtttttattgaccataacaaaatgttagggtaatatataagacgtaaggaggtggtaaataaatgagtagcaatacaaaaatcactttaaaagctgctagagttaatgcaggattaagtcaaaatgaagctgctaaaagcttgagctcatacttcggtatgcccatttctaggcaaagagtggcttcttttgaaagcaatcctgataaagtgccgcctgcttgggcagaaggattctcaaagatttataacatttctttaggtgatatttcttttacccatagttaaacgttatgttagatttagtaagggggcgatgatatgaaactcacgcttgaaggctcaccaaaggagctgaaggaatttcttagcccgaatgtggatgcgagaaagttgtggaaacaaataaagacatcagcattacagccgatgtctgaaaaacaatattcaaaatggattaaaagttttgctttttcgtccacttcaaaatctcgggataaagagatgcataagcatctaaaacatgaggcttagcatgaattttgacaccataagcttctaaatcatcccagtgattttgaaggattaagagtgtcaaatcatgtgctctttgttcattatcaatcataaaattcaccttcttattcgagtatgaattcattatatgacaaagaaggtgatgaaataaaaatgtggaacgtagtagaaaagatcttaaaagaaagatcacttaccatttatcgtttatcgaaaatgacaggtatttcagataacacacttagaaattatcgaactaagtagtctgatcctagttttactaatgcttgcaagattgctgatgcattaaaggtaagtctagatgatttaagagagaagtaaggaggcgacaaaatgaatattagagaggcttgtttaatggcaaaaaaagaaggtcgtggcataactcgtaaaagttatggcccagaccatcaatatatttgccaaccaatacaacagcttgcgttttaattattccttttgcagaaggacattttaaaaccaaacgctggaatccaaacttggatgatttggttgcaactgattggtatgtatatggctaaaaaagattagttatacagtctgttttctaaagcaaaattgatttgttcagaatctaaaacaactttgggatgaaattccataatgttttgagcgttatcaatcttaaacttaaatctcattttgtcagaaattatgtttgtagatctgagattctgaaagcttattacaaaggttttagacgatctaggtggaatatttaatggagtacagtcactaaagacaaatactttatcattattaaatctagtctgtgatattagttttactggaaaccaagatgattcaacagtttcatcttcatttgtgaaataaatattagtaatcgtcgatggtctagaagacatatttgaaactaacaagcagatatttaattgctgacctagctcataggtccaacgtaaatatacacgtgtctttatatgtttctcgtaataagtattaattgctgaataaagtgagagtgcaaaagctaaagtagctattgcaattgaaacaatttcgtaaggagtcattgagatacctcatggataaaaattacataattgcgattattggagcggtattagccattatagcaataattttagccttaatttagtcattattaaagtcctgaaaggaggtgaaaaatatgtccgataaagagttattagaaaagatgaaaaaatatatcggccgcaagttggatcaggacagtgatcctaacgccatgaaagctatcatttctgaatacatgcacctgaaaggagatgattatagatgatggccaatggctggaaaacaccaaaacaaatccaagaagactacaatctggcagataaaacgtgggcaacttggagaaaacagtgtgaagcatcaccttatgcggatgcaatcgtgagagtgtcgacaagatcgacatttatcattgaaccgttgtggcaaaagtttttgatctggcagtcaaaaaactttgaagaaaaacatttagatccgcacttgcgcgatctgaaagtattaaaggagaactgaactatgacaaaaatgaaaacggtaattgaagtaggtattgtaattggctatgccgctttattcgctttagcgatcattggtttgtactgcaaccctgacgttttatcagttggaatgtaggaggctgcagcatgtcaaacgaaacatttaataatctgttgaagaacagcaatgctttatttgatcgtgataataaaatttggtcaaaagaatcacttttgaccaaaatacaaaaaagcgtgttgcctgaaatcaggtaacacgcacaccaaaaagaatctacaaagattatatcacaaaaggaatcttatttaagaggtaacaccatgccaaaattaaaaagagtatatgacaagagttacatggttattagcaatcatgtttttgaagatcccaatttaacactaaaagcgaaagggttattcggctacttatggtcgagacctgatgactggaacttctttatcaccgaattggttagacactttaagggtggtagagatcaggctatgagcgctttagatgagcttgaaaaagcaggctacttgcttagaagtcgtgttcgaaatgaacttggccaacttactaataaaagtacctggttgctatctgacacacctaaaaagacttggatcgagcaaaagagaaaatctgcagctaagaaaaagatagtcgttaaaaagcaggttcaaaaatctgcttctaagaaacctgtggataagtctactaagcctaagtcggattttcctacacaggcttttcctacgttggataatccgacactactaaatactgacttaactaaatactcatataacaaaatacttaataattttatttatacttcttcttcttcctcctctactacacaaaaccaagtaaatcatgaagatgaagaagaaaagataactcaaacaatgtctaaattatttgaatcaataagattctatgacaaattttacggcacacataatcgaccaaatcttagacaattaagacaaattaggacaagagttgctcagcttcaagaatcaaatagagatgaactatgcaaggcatacgatgaacgaatccgaaatctgtatgttaatagtccaattggctatttgattactatgcttaatcaagaactaaaagatcaagaaatatggaataaggaggcagctaccgatgcagaaaattaatcacgaagacgaaaaaattagtttagctagaaaaaagattttagttttcttacctgctggaattacaactacaccagcttggctgtttgctaaatttacaacatcatccttagctagacgtggaatcagaagagttagtcctgggcttagaacctttaatccagatgaccaagaaaaacgtggccaagttgaatatgtcattcagcaaaataagagtgacagcgttaaaagagttaatgctgatacgccaattagttatcaaggatggggcagatggtcataaatgggcaagaaagaaaaagcaacaattaagaaaatattggactcattacagcaagcagatgatatgacaatggctttagattttattagatctgcaatattacttggttgtactgaaagtgcaactgcaaatgatggtcatgttgtgactgataaagaaaagaagatagtcataggccgaatgcttatgaaagctttagctctttttaatgatcatgaaatgcctgaattacttcaatcttttaatgctgatgaagaagactttagtcatgatacacacggtaaattacttttaaaaataattgatgctgaattggatcaaatgtgaaaggtagcataaaaatggcaagtaatcgacttgaagatttaaataatatgctttttaaccaactagttaggttagacaaagatgatattagtgatgaagaaatgaacaaggaaattaatcgtagtaaagctatgaatggaatagcccatacgattgtagataatgcacgcgttgtattagatgcagctaaattcatggataaccgtgaagatgctaattctaaattacctcatatgattggagttgatgcacctgatgacaataagaaggtctgatggcacctttgttaaaggtagcatcccttggaataaggggttacatattgatttaagtaatggcaaaggtcagtttaaaaaaggaactattccacctcagcatcatgaagttggctatattgcacatcataaagatggctattcctttatcaaagtagccgaacccaaaaaatggcaattatatcaaaggtatgtatgggaaaaagctcatcgtaccaagttatctaaagatcaaattgttattttcttagatggcaataaagaaaattttgacccagataatttagcagtggttactcgaaaagaattaatgatattaaatcatgaaaaaatgctgactgcagataaagatttatctaaaacgggagttttagtagcaaagctaaagatgaaaattaaggagaaagaaaatggctaaaaagattgtatggcatggaacatttaagaattttaaagcagatgctaagggtaatgtgactcttgctttttcaggaacaggtaacaatatcaattggcaatggctgaatgagtttcgtcaaaatggttctgttcaattagttattactagtgatcaaacagaactagatttagatgataattctgatgattcaaagcaagtggaattatttgatgaaaaaggggatcctaagaatgaatcaaagtgatttcgttagattaatcagtctctacagggatgcccatgttagcttttcttatgatcgtgtaaaaaacactttgcagttgattactatcagttttgaagatgagtgtgatgaaaattactgtgaaatcatagcagactggcacactcggagcacaacaattttgcgttcttcagcattagagcctgatgagttgctgcaggtttcttacgttatgaaattgctcgttgactttttatataaaggagtagttgatgatggatcaaaagaaatggaataatcgaactccttttataccaggtaaatcttatatacctgcaaagttgtttgcaaagtattctgcagcagatttattaaagtatggtttacgcaaatggcctgatggaactgcagttgaaattaatgctggaatttttagccatgcaagattgctagtcccaatgaagcagaaaataacttttcaaggtccaaattggtatatagatgtagaagggtacgcgtggtgctagttaaatcgttttagttaataaaaaagtccaatcttgttagactcgacttgtaaatagtaataatagaaaagagtctgatctgattgaactgtcttaagcttaagcgttttagccaccatttacaagttagttttaaagatttagtgataatttgtcggcactggtatcgtttgtatgcaccggctgagtttactcatcggcgaaatattgatcaaattaaaactacggacagtctgattttggctttacttatctggcaagctaagacaggaattgaatcacaaagaagattctgtgaatgtttcaattgtttatcacactcacgttttaatcgacgttcacgtcagctattgcaattgatttatcagatacggcaagaaatgaataaaaaggttgacctgaatggacatttcttgatcattgacagctttccggtacctgtttgccaaccaattcgcaactatcgtgctaaaatttttcgcggttatgccaacattggttataaggccaccaagaaaatttacttctatggtttcaaagttcatgtcattgttagcgatgacggttacattcttgattatgtcgtaacaaaagcatcagttcatgatgccaaggagacagttgaactgatggaaaatgcacatccatctaattactatcttcttggcgacgaaggctatttaggcaaagaactgcatcaacagctaaaacaaatgggttatgaactttggacaccatatcgtaaaaatatgacaggagctaaaaagcacaatgatcatcaattgatggctattcgcagaacaattgaaagcgacttttcgcttctgacctattacaatgccgagaacaatcgagcacgtagtctgataggctttcaaagccggttggaaattgcaattttagcttataatttggcttattgtctagaaagatttaactagcaccacgcgtagaagggtatacccatgaagattaaaagtatcaaaattaatttaaataaagagcgactagacacagttatgaaagctatgcgtgcgatcgaacatgaaaataaagccgaattctataaagcttgcgatcaaattgtagcagatacaggaactagtaaagacgacgttgtttttcatattttatgttctacgtataaaaatgcaatttcaatgttaatggcaaaaggttaggtgagttaagtgactgaagaattactaaaaattcaagttaagaatgatcagcaattggtatccgcgcgtgatttacatcgtggacttggattaacaactagatttagtaaatgggttgagcaaaattttaaagattttgaactaggtgaagattatacaagcgtaactgcagttacggtagttggaaatggtggtcacaagccgatccaagattatgccttaacaatcgatatggccaaacaactatgcttaatgagtcataccgataaaggaagagaatatcgtaaatatctaattgaaattgaaagaaagtggaatgatccacaagaaattgttagacgtggttatgcaattcttcagaatgagaatactcaattaaagattgagaatcatcaaatgaagcctaaagcattatttgcagatgccgtaacagcttctaatcgaaccattctaatcaatgatcttgctaaaatcttaaagcaaaatggtgtgcagattggtggtgttcgtttatatcgctggctaagagagcacggttacttaattaagagacgcggatcagattataactctccaacgcaaaaatccatggaacgaggtctctttcgtgttaaagagtctgtaattactcattcagatggtcatacgactattagcaagacttctaaggtaactggcaaaggtcaaatctatttcgttaataagtttttgaatagtgataatcctgatacggcacaatttagggaggaaaaataatgaaaccttgtgatttttgtaatttcaaaaatagagatcgtcaaacatacgtaatttactatcgaaagaaaaatgatcctacacatcagagaaattttttgttttgctatcttaacaataaaggtgaactagaaattgacggtaaagatattgaaggacatactgatgaaccagttaatttttgccctaattgcaggagagatttaaatgatgaagattaagtattacttcgaatcagcatggcactggtggtggtctatttggaaatgatgctttggatagttaatcacttaaatgacattatctttgtcgtgtggaccgtgttgctggctatgaacatgtattctaatcataagaatgaaaagtccaaccaggagcttttagatgagattcataatagcaatgatttaaacgacaaattgcttaacacggttaaggaatacatgcaaacaacagataaaaaagcaacaactcaagacaacattttgtgggacagtatcattattttggctaaaagaattcatgatttggaggataactactttgttaaataagaaaaaatggatttcatttgataaaaatggcaaaagcatttatgctgattcaattgttcatgatgaagaagcagatgaatatttcatccctactgaaaagaatggtctttatggggatgaattccttggggatttttatttattagagcctaagaaacttacagtaattagttcccatacttcaatggatgatctaaaaaggatgatgaaaaaagataaaacctcaggtgcagtttacaatgttggaggtaactttaatgtctaatccagtggccgatggctggaaaaattatttgcactattttgcaaaactaggtagggaagttgatcaaatgaaagaaaatattgatattcaagttggaaccaaaaaatcaaaagagacatggaataaaacatataaatcagttttcttagcaaacaatggctggaaattttatgaactttcaggaattagattttgccagtatcttgctacagttcaaactaaacatggtgaattggttgttcatgatggtgattcaattacatatctaggccataacttgtgggatgtacgtaaaggataataatcatgaagattaatattgatgatttagatatttatcaaaagacctggaactacgggatgcagaagattgctgcaagtattattgctgcagcatataacttgaattctggcgatgttccaattacaaaaacggattatcatcatcttgtatttaaaggatttaatccaatggatatgaatgagagttttgaaattcagttgaagatagttcctaaaataagctttaagcatagtagtcatgaatagctaatcacaaacagttttagggatgcatgaattaatgaggtaggttaagcaaaatgtattatttaaaagaatttgagcattgggatcgtaaaaagactgcagctaatgttcaacagtttcttactaatgattttcctataattatgagtagagctgataaacagattacagatattactagcccacaattaaatagcatccctagtcacactaatggaaactgtcaaatcttttgtgtaaatagttctttctcgtaaattgattttttaattatttatttaatcaaagtaggattctaaggtgtcctgaacctgaccaaagcctttatgaattcgattgaaataacggtcattgtagctcattgcctgaatgccaataaaagcatcaagcgactgttcagttggaaactctgccttaggcttagctttgcgcttgatcacattgttaaatgattcaatcatgttagtcgaataaattgaagctctgatctgcttgggatagttataaaagaccagcagatctggttctatgtctttcaagcttctgataacatggctgtaaaccttgccccatttggtatagaagtcatgcaggacagctgtggcttcttctttgtttgtctgttgatgcacctgtttgaattcgttcatgatcttttcacgatcgtcgacgcgtactttagcgcagatattgcgcatgacatgaaccaaacagcgttgaaaatgagctttaggataagtcctggccaaggctgttttcatgccaacaacaccatcagaaagaaaaagctcaacttgctttaagcctcgggatttcatgttttgaagcatatctgtccagacttcaatgttctcgctaggtgcaatgcagtagtcaatgacctccttgtgcccattaggcttgatgccaatggcaatatagactgcttcacgctcaaatgtttctcggcgcaaaggaaggtatgtcgcatccaaatagacgcagaaaaacttgtcgcttagcttgcgtttgtggtaagcctcaacctttggaatcatctgcttggaaatatttgatacctgagctggactgtaatggctgccatacatcttttcaattagatcggctatttccctggtggtcacgcccttggagtaaagcttgataatcatgctttccaagatatccgagtgctgcttgtagtcaggcagcgtgtgctgatgaaattgaccgttgcgatcccgaggcacttgcacttcaattgggccaaattgcgtatcaactttgcggaaataagcaccatttctagagttgccagtattccagccatttctggcatagggatcatagcccagaaaggcagtcaattcagcttctaacaagttattaacagcctgttgtagctctttgcgcaataaatcatttattttgtctggattgaatagagcttgagcaaaatctttggtaaaatcattcatgaaggagttcttctttctgtatgtgtttttttgttcaaaccaatcatacgagaaaggaactcctttttctaatgtttaaagaaataaatttaaggaatcattcatccttacacaaactattttacagtctccactaatggtaattcacaagagaaaaaggttttagatcatattaactatgttgctgtgtttttatgtgttgctgatacatatgctcatatgtctaatgatggtaggaagtatagagagatcattaaattattatgtctttacaagttagatagaaatactgtttctaacagattgggaatagatacttcaactttggataaaagaaaagttggtgctctgtgtgaatttgctaatcgatttgaagttcagaaaaagaggcatgaacaccaagtagattggattcctaattttagagttccaaaataaatacaaatctgatacaagattcatacaactttcgtacaacatttatccaactttgatacaagatttatacaacattcatctaacatttatccgaacataatgagttattatgatattgtgaattaattgagagaaattgattcgcactcttgatacggtaagtcatgtacttaacctccttttgtgattttaaatagcaggcttagtaaattactattggctgctattattatgagagtttagtctaataggtaagacgtcaaacattgcctgaagatgcaggttcaaatcctgtaactcccttttgaatatttattgtagtaatgaattttaatttataagtttgttttatgattgacatcatggtaaggtatatcgattaataaatattcagtacatatttatgtaacggaagcatcttagtaatactgagtgtgtaggttcaattcctacaatatgtatagatggctttaagtcatcaggatcgaacgtgtcaaacggtcaatgaagaagcaattgaggtttcagttgcttctttttattttcacaataaggagtatgtaaaatgccacgagtaaggcgatgcaagtatctaggctgtcatgcatttgctgttatgcctaatcactattgtcaaacacatattagtcatgaacaggaatatcttgacagaagaaataaatatcatgaatctaaacaaacacgttggaaatataatcatgtaacacgttatcgtaattcaactaaggcaaagcaaaataagttttatcatacccgtgtttggaagaacctcagaaaggtagttctccaaagagattaccacctctgtagatattgccttaagggaactggaactatagtagatcacattgttccagttgaatttgatattaatcaaattgataacgttaataatttagttacatgctgtcgtgactgtcacgcgaagaagacacggtgggaacaaaaatattatgggactggtttgcataatcaaattaaacccgttcctgagattacggacattaaaacaatttctaaattaatgaatgttccagacgggtatgagaagcccttagagcaatttaatttttgaagtccatagtttatcaaaacataattttttaatgccccgccccatgttttgcttcttagggagccgcaacagtgtcgttttcttgtgatgcgcaaacatttttgaaactttttgataggggggtcaaatttggcgaaagttgatttatcaaggccgaaagtgcctacacaagttccaaaatggcttgataagtacggaaaacttttatggccaaagatggccaactatcttaataaaaatcctaaagtcctgcgtgcagatgaatatttattgcagcagtattgttcagcatatgatgtctatcgtagagctcaacaatctcttaaagatgatggactgcagcagaaaatgtttaagacggtagttaaccctgtgactggtgaggtaattaatcgagattttgccggctatagaaaaaatccggcttatcagatgatgtctgactcattatcaaagttaaattcaattggtcgtgagcttggattgagtcctaaagcacgatcagaaatgatagagtacaaggcaccagatgagaagaaacaatcaattacagattcaatgaaggagttctttaaaaaatgaattggattaataattatgcacaattgaaatattttgaggagatacttggtttaataattggtggaattgtatttatagtgattttcattctatggctggttatgtggtttaaggattatagaaaatggaaaagataataggaataatttttatcataattgctttatttgcactaattcaagaaggaaaagattgatgctttatttcaaatttaaagatgacaaatggtttgaagctaaatcaagaagctttgcttatatggcttataatttaagctatgttagttctcggctactacttatgagttttactaaagatgaaactcaagcaatgatacaaatattttctaaaaataactagcaaaacattagcttattaatatggaggtggtaaatgtaatgaaaattgatttaacacaaacgcatgatgtacaaggtgcctttgaagcagttaattggacggacattgccaccaaatataccgatcgtggtactaaatactgtttcgctgttttacatggaccagtaatggcaccatataaaattaaattagcttgttttcggcatttaagagatttgcaacgtcaggatcaacgtgattttccttatcattatgacattgcggagctggatcgctttttgaagtttgctgctatcgttcctgaagctaaatcaaataaacctgtagccttaaccgactcacaggtttttattttttctcaattagttgcgtggaaagataaaaacaatcaaaaacgatatactaggggaattttgtcaatggctcggcacaatggaaaatcatttcttatgggtgtctatatggcttatacatttttgattgcatctattggattaaagaatcaagattacctaatttcatcaatcaattttaagcaaacatctaaattaatgggttatgttaagaccacactgagtcacattatccaaattgagccatttaagtcttatgccaaagaatgtggtattgatccaaagagtttaagttcacaagcatctcaagtcagaatgagaaattctaataatacaattcatgctattacttataattctggaagttatgatggcttccacttcactttggccataggagatgaatttggtaaagttgctgacacccaaggagtatcagatattacgactggtcaaaatggccaagacaatcatcaatttattcaaatttcaacagcgtatcctgatcctagtgttccttttcatagggatgaagttaaggctgttgaagcaatggaaagagattgggatcgaacaagtggtgataactatctttgcttagtgtgggagcaagatagtaaagaagaattattcgaacctgataaatgggttaaatcgaatccgctcatttactgtaaaccgcaaatgaaaaaagatttgatcactgatcgtggaaatgctttgttaactgattcagttgataaatttcaaaataaatctctaaacatttggcttgagcaatctagggatagttttcttaaattagatgatgttgagagcgcaattctagaggactttacaatagataatcgtgaggtattcatcggatttgactactcaatgttctctgataacactgcaattagttttgcatttccatatggtgatggaaaatttcattttatgcagcattcatttattccatttcaaaaagcaggttcgattgaagtaaaagaaaatcaggatggactaccatatcgtgagttggccaaaaaaggatattgtgatattacagaacatccagatggcattatcaatcctgaacaagtttataaatggctgcttcaattcgtagaagaacatcatctacaagtggttttctttggctatgatcgctggggatcattccaggttaaacaaatagtggagtcattaaacgtaaatactaattggaatattatggatattcagcaaactacactgcagttggccaacccaacaaaatttttagaagagcaatttattactcataaagctacgataaatgatgatcctatcatgaaaaaggcattgctgaatgctgtagttaaagaagataaagttggtattcaaatagataagatgaaagcaactctaaaaattgatgtggtcgatgctttaattgatgccttatttcaagggatgtattattacgatgaaaatgctgatattaattctaaggaaacggaagtagatagaatgactgaacaacaggttcttgactggtttaaaaatccaaattcgggactaggagatgattaaactgacaaaaaaagttttaaaaaaattatggttatacagtgatatcattgcttggattttggcaatgattttcttttgtattgcattttttactatcaataatacatttggacttttttcaataggaattagtttggttgttttaggctatgtttttgaattcattggcagaagtaaggggaatagcagtaaaggaggtgaataaaaatgccaatttttaatcaagctcctaccaataaatctgctatttctctgaacgatgatcctggtatttggtctgcattaaataagactgaagatgagtatgtatctgcagataatgctctggaatactctgatatttattccttgttgtcacagttatctggagacttagtattagtaaaatataaggctgataaatctagagcacagtcattaattgataatccaactggtacaaccaatggagccgcattttggcaatcaatgtttatgcagttgcttttagtcatgtggtaataagtcaatgtaaaagttaaattttatttttaattagtttgttttaaaaccaaaatttgcgtgcatgaaactaagccctatttcaagggattttttaacaactattatttactcctccaaaaatgttttagaccaattaatcacctcggtgtttgatagatttgaccatttttgagcagagtgaaaatggtcctggttaattttcttgcacaaagaacgcaagcgcgtttatgcggagaatagaaagcttcatcgtatttcttttgatagtacttccgaaaaacgggatctctttgtctaatcaggttggcagcttcaaccaaataatatcttagataatgatttccgtttttagtcatcggtttgtgttcgctatcaaaattactagattgcttttgacgccaagctagaccagcgtatttagctagctgtgcttcagtgtcaaagcgatcaatactgccgatttcagcgataataccagcggaataaactgacccaattcctggaatagattgtagtattctctcttcaggaagcgtttggacgatatctgtaattgctttatctaagttcttaatcaatttctgattagttttaatttcggcatagtaaacagataatacggcatcaatcgagtctttcatgactttacctaagcgatatgatcctctaacggcttttctgatcgctttagctaaagtctctggatcagagaagcggccacgtcctttggtttgaaggtagtcaattagatcctcgattggcatttcagcgatttcatcgatggttttactatcagtaacaattgacagcatcgttgcgccaaagatagaagttttaatattgtctttgtcaacggtaactagtttgtttacacgataataaagagtttcaatgaagtgctgcttagctctagtgagcgaagatgtgatttcatatctagctctagttaaacgctgtaaagctaagtattcctcttgccgagcaatagtgacatggtatttaccaaagcgtaagtattcagcgatgtaataggcatcagtaggatcattcttattttcttcgtaaacgtcatgaaatcgtttagtgtttttaggattaatgacatcagtttcaagattaattttttgtaaatcttcgtcattggcaaagaaataagcagggtgaaagctatagattgaagtggcttccatgccgataattactttgtcatagctgttctgtttagcaagttgaagaattatctttttgacctcattagcaccaatcaggtcattagaaaaagattggttaagtaaaggtttttgataattttctgagtcagtaatagcgacttgaagatcttttgaactaacgtcaattccgataaaaagtttcattgagaatggcctcctttctagcaaatatttggtcatagatcgatcatcacatgttagtccctaattacagattctaagacaatctcgcaaaatataagtattcataggttcaagctaaaaagctgcgactgaatctgctctgaatcagtaatagccagaatcgatacagcatgtgagtaagtcattagtaaaactgcttgggcggcagactaaaaaagtagtcaaagctacagaaggaaacaacctataccaattgaccaaggtcaatgacaattagagactagcatctgatgatcgaataaacaaactaaaagaataatcattatcactgatttaatttatataatacgagatggaaatgcttatgcgtatcgctggcgaaatattaacggtgttgacttgcgttgggagtttttacggccatcacaagtacaaccatatttattaagcgatggatcaggtatgtattacaacgtaagttttgatgaacctgaaattggaactaagatgtatattccacaatcagatatgattcatattcgattagcatctaagaatggtggcttgactggtgtatctccactgaagtcattaaagcctgaaactcaattaaaatcagcatcaaataaaatggccttaagagctttaaagcaatcagttatggttaatggtgtgctaaagattaagcatggtgggttgctagattgggctacacgtgcttcacgttctcgtaaggctaaagcgcaaattgataactctaatggtggtccatttgttatcgatgatttggaagactatcagcccttagaagttaaatctaatattgctaatcttttaaaacaagtagattggactggttctcagattgccaaagtatatggtgttccagattcatttattaatggccaaggtgaccaacagagttcaattgcacaaattagcaatcagtatgtaaaagctttaaatcgttatgtgactccgattgtaagtgagttaaacaacaagcttaatattcatattgataaagatttacgaccggcaattgatgttttaggcgataattttgctactactatctctagtttaaaaaaggatggtacattagcaggcaatcaagctcgatacgttttgcagaaatcaggatttttgccggatgatcttcctcagccagatttaactgcagaaatgacagctaaaggaggtgatgataatggaaacactggaagtcaagggaataatcgtacctaatgatttgagcgatgtctatgattggatgggctatgattcagtaagtcctagtagtattagggatgctttgaatcaagctagcggtcaagatattgtggtagagattaattctcgtggtggctatgtggatgcaggatcagagatttatactgagttgaaaaaatatcaaggcaatattgatattcaaattgttggttatgcctgttctgctgcaagttggattgctttagccggcgacacagttgaaatgtctcctacggctcaacttatgattcatagagcatcaggaggggccgatggtaacgttgatgatcttgctagtgccatgcaagggttagatcaaatggatcaagccttagttgatttgtatgccaaacggactggtaaatcagcccaggaagtatatcaactaatggctaaagagtcctggatgaatgctaaaaccgcagtagcaaatggttttgttgattcgataatgtttgaagatgaacaaatgccagctgtagtaaatgctgatggtgtccctattttaagcaaccaagtaattaataaaattaagaacttgattaaagaacctaaactacaaaataaaaataagccaaagagacaagttaagaatgaaaacttgtctctcttattatggagttaacaagaaagaagataagaaatgaacggaaaaacaattaatcagttgcatgatgactggatttctgctggtcaaaaagtaactgatcttttaaacaagaaaattggcttaaatgaaaagtataagtcttcatataattctatgtctgatgaagaaaaagctaatttccggaaggaaatggagcaagctaagcaagattatgatgctgcagttcaagctcgtgattttgctaaaggtacgtttgaagatgctcaagaagctatgaagactatgcctaagccaactaatggtgtacctgtagaaaaacataattctaagagcaactttgccgatgggtttagagatatgcttcgtcatcctatgaaatacatggaaaacatcgctactagtgacccgaatgaacctaacactttaggtttagctattcctgatgatcaacaaactaaaattaatactttagaacgtcaatatgattctttaaaagatttaattactgttgaaaatgttggaactgatcatggttcaagagatttggaaaagctgtcagaaattaagccaatgccacgtcttgaccaatttgatgatcaatctgatggtacaaagaaaaagaattataacaagagccaaaatactgatattcctgaaggggattatccatctattaagaaaattaattatgtaattggtgactatggtgccattttctatgcaagtaatgatttacttaatgattctgatgctaacgttgaagattacttaaatagacacattgcattaaagaatacagttacatataatcatgagattattagcagattgcctcaatcccaaaacaaagctactttaaagactttggatgatattagtgatgctgttatggacttagatatggcactttgggatggctctgtcttattgattaataaatctgcatttaaggctttaaaagaagttcgtttagcagatggtcatcatgcacttacaactgatgcaagaactaatatcacaacgtttaagttagatgaatcaacgtatgcagtagttcgcgtagttgaagatagatggttacctgataataagacagctgcaggcaagttccaaagtcatccgttttactatggtaattttaaagaatttttacacctctttgatcgtcaacaaccacaattacttacttcaaatattgctgcacatgcatttgaaagaaatcaaactgctattagatcattacttagaatggatcttcaagtgtgggatgatgaagcaattatttcaggttcatttgataagattgctagtcaacctctcattttttcatctgtaggggtaccaagtagcactgatgctgctgatgatgcgaataagaagagcggacaataaatagaaggtgatctaaatggccaaagtacaattttatttgaccattaaagatggtcttgaagatcttctaggttatatagatgatgatttaactgaagaaatgaagacccgcatgattacttgcttaaatgcagctgaaagctttgttcaaggttccgttggacctgatgatggtaatttctatcaaaaaaatggcgtaaaaaatctttatactgttgcttgtaattcctatgctgctacgttgtttacctatgcttcaacaatatctgtaagaagagtaaataatgttgatgatgtttgtcgcagcatcattggtcaattacgtggtaaatatgatgctaaagacgatgaggtgaataatgatggtacggaacatcaatccgacatctctaacggtgttaattaaattcggtaaacctgaaatgaaattaaatgaaggtactggaaacactgaaaatactggtattaaagtaaaatttagaacacgcggtagaagatattctttgccaattactcagcaatttgaacattctgatgttaactggcggcaaacttttgtttatgtagtacatcatcgaagagattggtccgaagttacatatgcagagatcaatggacagatgtatcaagttactggaattaatcctgactcagctaatttgcctaatagttatgatcagataacacttactcgaattgtagaaggtgaagagagtgatggataattttgaaaagcaacttaatcagtttatggaagaaataaaaaaacaagtacccaataagaaacaaaaacaggtagcaactttagctggtgcaaaagtttgggctgatagtttatctcatgaagctaagcaaaaacactattctaatcataaggataaagtttatggccatatggctgataatgttaaggtgtcaggcaaaaacatagatggtatggttgatggttcagcaacggtaggctgggataaaagaatacatgcaatgaatgccctgtatactaatgatggaactgtaaaaatgcgtggtgatcattgggttgatgaagctcgaaaaagctttaatcctgaggtgtttaaggctgagatagctgcccttaaggagatggagaaatgatttcaccacctataacagaagtttataaattaatcgctaaacaagattatgattggttagatttattagcatcaggtaataaagcgccagatgcgacaggaaaatatacttcaattcttattcagaatgctgatgaaacacctgatggcatcaggaataatcgttcaactttgattcgatttagaattgaaatacaaattttctttaaaaaaggttttagtcaaaatatttatgaaaaaagacaagtcatagaagatttgcttcaggatgatggctggattctttcagatgaaagacctccggtaccagatcccaaaacacagcaaacttttatgactatttattttataaaaaattataggagaaaataatgagtgaaaaattaggtagtgcagctcatggtattgatttaactattttgagcggtatttcagaacaagatggtcaagttgttaaaggcgataatggtttaactcaagatggtccttatgccgttgatgcaggtattgaaggtgcaactcaagttgaatatcaaactttggaagcagccggtacagatcaatttgctaacaacaagcgtaaacgtactactagaccaagccaaaacccaacagcaacagtaacttacttagacattgattgggatgttttgaacaaggtagttggttatgaagaagatgaaactggtggtgcaactcttgatcaagatcacaaaccacatatttcattgttaacgcgtgaaccactattggacggtaatttcttatatgaagcatttgctaatgctacagcaacttaccaaacttctactcacgctactgataatacagaagaacaagatgccaacgttcaattgagtttaaaggcatatgaaccaatcgcagatgttttcaagcttaagagtggtaagaagatgccttataagaagtggaattcaggttctaagaagttcgatgaagctaagatgcttcaagaagtattccctggaactaccgcaaaaacagtagatgacattcttaaagcaagcacaattaagacctcaagtgcaggcggtaatccaacaccaggtaattcaggtggttctactagtggtacaaacacaggttcaggaactgattcagaaaagaagacagaaaatagtcactaattaaaacgctgggtgggagtggaaggtaaatcgtttttagtcagcaaatcaatttaattattttttgaaaggaaaatactatgccaattcaaattgatacaacaccattttcaagcattattaacaaaaagactattggagttgaaccaacaggagccatctttgataaggctcaagatattcaaattgagttaatggatggagacattaagcgtaaggaaaccttcttggaatttaagaagcgtgatcgtcaaactgctaaagacgtaaaagaatttattaagaagacattgtctttaacaactaagcaatgggataagataaatgaaactattgataatgatgtactaatgaaatttggcatgtatatggctttagctcttcaaggcgctgaatacgattcttatcaagactatgttgattttattaatcaacaagctgaagaggatgctgatacagacccaaaatcctccaatacaaacgaagaaaattagtttttgagttaaaaaatagaagattagataagaagcgtttgcgtaaggaaatgttcttgaagcatggaatagctcctgatttttggaagaaaaccaatgtctttgaattgatggatattcttaatgttccagataaaaatccacaactaccagttgcgcatgatggtggcttttacgataacgctgattgggctgaataagccctttttattttgcgctggaaaggaggaaaaatgagaattcaaaacgtaatggccacgagtatcaaaattgatactgtgagtgctactcagtcattgcgttctatgaacacagcattaaaggcttcaacaaatgcatggaaagccgaagaagttcaagctaaaagtgttggtaactaccttaaggcatctcaagcaaggtatgaaggcctaggacgttcaattgatcaagctaaagaaaagatcaaattaattcaagaacgacaaaaagctcttgatcttacaactgaagatggccgaaatagttataaccgctatgctaagcaacttggaataaccgttaagcagttgagttcaatgacagctcaacaagaacgtgctaaatcagctatgcagtatcaaacttctggtttagctagccttcaatcaaggtatcgatcacttaatgaagttaatagttcatatgtgaagcgattagaagcagaaggtaaaaagtatgaagctgcaaagacaaggttaactagttataaatcagctgtcgaaaatttaactaagcaacaaaaaattcaagagagtgaactttcaagaattgctagtgaatctggaaaagctagttcggcttatcatgctcaagaagttaaagttaatcaaactgctacaagcattagtaaattaaattctaaagttaaatctgctcaatctgaagtaaataaacttaatccaaatggctttaataagattgctaatggtgccaaacatgtaactaatgcagctgataagatgaagtccagcttaaaaaatacgtgggaacacgttaagtctggtgctactgctgcagctgctggtattggagctgtgggagctgctgcaattagtggagcaaaaaaggctggtaacttagagcaatcctataaggaaatcactaacttagccgttactggcggtgaaaaacaaaaggaagcaattaaaaatgtttctgaaatgcaacgccaaggccgagctatgtcaatccagtatggtaagtctcaacaagatattgctgattcctatgaggaattagttaaaagaggatataccactaagcaagcattaggtgctatgcgaaccgaattacaggctagtgttgcatcaggtgatgactttaaagatgttgttgctgtatcaagtacaactcttgagtcatttgggatgcgtgctaagaccacggctcaaatgacttataacaccaagcgtgcagtaaatgagttagcctatgctgctgatatgacttctaccggtttcaaagacttagggtatgggatgtcctatgttggatcatccgctcaccaagccggttttggtttatctcaaactgcagctgctatgggtattcttagcaataacggtttggaagcatctaaagctggtactggattaaatgaagttatcaaccgcttatctactgctactggtaatttgctcaaaggtgacaagaagaatgctcttgcaaaattaggtattaagcctaaagaaattactacttctactggtaaattaaaagatctttcaactgtatttggtgttttaaataaacacatgcagggaatgtcaaaggtccaaaagatcaacatcatgaaatccctatttgggatgaccggagaacaagcaggtttaatcttaactaagtacaacaaacaacttggtaccttatctaagcaaactctcaaagctggtaaagatggagattatgttgctaagttagctaagaaaaactctgaaactgccaaaatgcagatggcacgtcttaagatgactggcgaagccttcagcatgactcttggggcaaaaatgttaccagcaattaatagagctggtgatagtcttgtaatctttcttactaaaacaaaagatggtaagaaattaacacaagattttgctaatggtgttggtgcagttgctaatgggttggttgaccttattaaatgggctactactcataaaaccgaagttaagtggatctttggtggacttttaacaggatattcagttgttaaaggcgctcaatttttacagtttttaaataaaactcggttggccatgtctgaacttggggttttaagtaaatcaaagactgcaattaaaggcgtgggaacagcatttaagtttactgccaaattagcaaaagctggtggtaaagggatcctaacggctggaaaagcatttggaaaatcctttatccaaagtgctaaaggagctggaagtgctattaaatctgttggttccattttaggtaagggagccaaaagagttggtagtgatctagttgattctggaaaattccttggtaagcaattagtaaagggattcaaaggctcggttaagctaggaaaatcaattggatcatctctagttaatggtgctaaatccttagttacaaaatctgtttctcttggcaaaaaaataggttcagctatttcaaagggtgcaaaatcaacttttaaatttagtgaaagcttatttgaaaaaggtaatagtgcaggtaaactaactgggcttctgcaatctgctcattctgctggtggttttaagaatttaactacagctggcaaagtcggaaccggtttagccggagctggtgttgctgttgataccgctacttcaattgttaaagcaattaaagataaagttggtagtcgtaagcagtatgaagatgtcggcacttctgctggtaaaggcatcggtggagcgattggactatggtttggtggtccagccggtgcagctgttggagctactattggtgccaaggttggtaaatggggcggtgacgctgtcaagtcatttaccaacggttggaaatccaagaaaccacctaaaaacttctggagtttagaaaatttaggttggagcacaaaagacactttcagcaaaattggtaagtgggggcaaggagtaggtcaaaagtttggccaaggtcttaataaaggtaaatcctttgctaagaagaacgccaaagagcttgccttaactgctgtttcaccaatgcttggaattccagcgcttctttataagaacaatccaaagttcagaaaatgggctaatggtgttggtaaaagcgtcaaaaagggatttaattccgtaaagaagaatgtaggtaatttcaataaatcagtttctaaaaatgttggtaattttactaaatcagttggtaaaaagtatcggcaattcacttcttctgcatctaagactttcaagaaacattgggatcagatatataaacatagttctaagggaaccaagcagatcatgcggtctactgagaagtttggtaagaactatgtaaagattaataagaagtatggtgatgaaactagaaaaaactttggatcctttagtaaacgattaaagaaaaatcatggtgatttattcaagacaattggtcagacaacaaaaactcaattaaatattgagaaaaagcgttggtctgctagttggaaaaatattagatcctttactggtggcgtttggaaaggccttaccaaaaatgccggtgatatgtataaatcacttaattccaaaactcatggtggcctaggtaaagtacttactaaatttaaagcatttggcaaaagtgttggtgacttctggaataatctttggaagggagtcagggatacttttgatagaaccattaagggattaaaggatgctgcaggcaatgtaggtaagttctttacaggcaaattaaaagtaggaaatattcaccttgctgatggtaccgattggaagaagaagtatggctatcctgcaattgttaatgatggttcagattctccagaaaccaataatcgtgaaggattaattgataccgatggaactttaaagatattccctaatgttcgaaatctaaagtggtggatgttacctggtcaacacgttgttaatgctcatgatttagcaacaatgtttggtagtggtgttcacttagcttctggaacacttgattttgatttgctgaaaaattacaagatcggggatgtaaaaactccaaatctattaagcaaattagtaaagatcaattctcaaagtctaaagctaaaattaaaaacttatgctgaggataaagaacgtcacgaaaagacaaagcgtagacgtgaaaagaaagaccggaaggctaagcgaaccactagaactagaaaaggtatggaatacctggattcaagtttctttactggtggtaagtcaacaggcaagattgtttctgtttcaaaatcatggctaaagaaatatcttgaatctaaacttccaaagagatctaggaaacgaacacgtactactagacataaatcttcatcttcaagatcatctagcaggtcaagaaatacaacaactacacgcagagaaagaacttctgttagtgcaagtgtaagtggattaagttctgtaagaagtttagctgcagcaattaaagctgtatctggtagtcatactgcaaagataactgtttctgcaagtagtgccaaatcagtaaaatcactaaaagctgcattaagtaaagttaaatctaaacgaattaaagtttctatttcaggaactaaatcggttaagtcattattaagtgcacttaaaggagttggtaagaagagtactcttaaaggtattagttctgcatcaagtcgattaaggaccttaagtaaaagaactaaatcaactaagagttcaattaaaggcttatcatcggctaatagtaaggcaagtaaaaccaataagactttagctagtcgattatcaaagactagttcaaaggtaaaatccttatataaatcagccaaaaagaacaaatttggtaaagaaattaagtctcaagctcaaaccgctgttaaatctcttaaaggaaaaggcaattttgctcaaacctttgaaagaatgactaagaagtttgataaagatttaaagattatgtcgaagaattcaagaaaagaatttaaatcgatgtggtctagcatcgaaaaaacttctaaatctggtgaaaatgctactcataaatcacttaacagctttagtagcaagtacagacgtggttggaaatcactagagtctggtgtctcaactaccttcaatcacttctggacgactatgagaaaaacggctggtaagggacttaataaagttatcgatgttcttaattctggtattggaaagatcgatacagttattggtaactttggtggtaataagaacgcagtccataaagttggtggtgtccactatgcaactggtactggttacttaggatcacaaagaagaccaataactggtccaactctagcaatacttaatgatggctttgacagccctgaaaccggtaatcgtgaaggggtttacgataaaacaacaggtgaattatctgttgtaaatggtcgtaacgttcctttggttcttgatcaaagacatgaagtatttaatgcttctgaaatgcgtgatcttggcgtaactagacactttgcttcaggtacaggctggttaaagaagctttatgaggaagccaaaaagttctggaaacaacctatcaaaactgctgaagctaactttggtaaagttactggcttaagtggggctgttaataccttaactaaaggtatgatgaaagttgctactagccaatcaaccaagtggtggtctcagctctggaaaatggttcaagataaagtcaatgatgatgatcttggacccgcatcaggtttattaaaagccgttgaaaaactaggacgcggtacttcttatagtcaagctagacgttatggcccgaattcatatgattgttctggtcttgtatcaaaggctatgaatgagtattatcacaagaattggggacctttaacggtagctggattgtggccacatgctcataaaatttcacgttcagaagcaagacctggtgatccaattttctggcttccaaattatcacgttggagtttacgctggtggtgataaatattggtcagcattttcaccttcagcccatccacaagtagggatgcattctattgcaggatcagttccaggtgtgaaaccaactttcgcacgatttaatggaacaaatactagtggtaatgattcaagtaacaaagatgtgaaagtaaaagcaaataatgctttacaaaaattcataaaacctcaagtaggtaaaggattttggcagattatccagaaaattcatgataagtatggtgataaaggcgtattattaaatggttttgctattggtgaaggtgctcctgcaagagcaaaggcattagccaaagctttaaagcgtcttgatccacgagctactagaaatggtattgccgctattttagggaattggttctttgaatctggtggactcaatccaggaatttccaattctgctggagcaattggattaggtcaatggttagatagagggccagcattaagagcctatgctcgtaggcatggtaaaagttggaaagatccagcaacgcaattgaattttgccatgtatggtgatagtgctaatacatctatttttaagagaatcttggaaggtcatggatcaatttccagtttagcagctgcgttttctagagaatgggaacgtggtggatatgattctcaacatgttcaaggtgctaatactgttagaaaaattcttgggtatgctaacggtggcattgttacaaatccacaaattgccgtagttggtgaaggtaacggccctgaaactatagttccttgggatattactaagagagctagagcttataggctgatagatagaaccttaaagcatttcaagcaacaagatgctccaaccagtcaaggtgaagattctaagctactacttgaaattcttaaggttatgacatcaattgaaaagaaacttgattctgaaattactgaaacaagaagattaggtgaacaaccaatcaatgtatctggtgactttaatgtagatggtcggaagtttgctagatacttaagaacttatttaagagaattcgatcgccaaactgttgttagagggaggtataacttaagtgacagataatattggttatattagctatcatggtaaatctagtgccgattttggttttggcataaatattgatagtaaaagagtgcattcagcgccaaacttaacttttaatcaaataccatctagctcaattgaaaatattttcagcaatgctcacagcagaagtcccactgatgtgagcttttcttgtacaatcgatcgtccggaaagatttgaagacatggatgatcttgaagatgcagtaatggattggcttgatggaagcgagtatgctccacttagattgagttggaagccgacgtacatttatatggccatagtaagtacagcaccagattttactcagtctcaagatgatatggaaagccatgagattgcaacgattactttccatatgcagccgcttaaatatcgtgctgatgggtattactggcagtctttgcctaagaatggacaaattgttaatcctgaaagattgaaagcttatccagattggcattttaaaggtactggtaattttgtattaacagtaaatgggatgccgtatcaatttaacaatattgatggggattgctacctggacggattgtcagcagattgttttcaagatcaggcaacgtctttaaatgaaaatgtcgtgcttacaaataacgatgcaccagtttttgagcatgggcttaatacgattaagtttgaacctcaaactgatgcttctttagatttaattgaatggaaaccgaattggaggcgaattctttaatggttgaaactgcaacttttgatcaattgaaacaagaatatggtgcttcagaagctgatgatcaagcagatacagtttactatttgaggcatccaattctttatgctaatgctgttgatgatgatgaaactaatggattaggtcctttgccggactttgaatcattaacaatcaatagtgttacttctcaatatccaacaggtcagggtgtttatcctattgatggaaaaaactttgataaacttgctgaacgtgaagtaattatgactgatggaggacctgatgcattgcatcagaaataccggatcatgaatattactaaaacggttggctcagaaaataccgttactattgatctaagacatattgatggtgacctagctgacttaactattgatgataatattcaacttcaaggtgcaagtgctattgaagcatttaatgcgatcgatcaacatttaactgcagcaaatccaggtatcagatttgattctgatgttagttcattatctgatgttaatttttcaatggatactccagctggaaatttacttactgatcctgatgctgaaggtgattcagcaactcaatcaattcttggtttgttcggtggcgagttagtttttgataactggcagatccatcactatcaacaagcaggaagggatatcaataagcctttaaaggttggtcgtgatattcaaagtctttcatcaacaactaatgttgaaagtacttatactgcaatttatccctatgtaacatataaatctgcacctcctcaggcaacagaagataatgttgattggagtagttatgctactaattgggattccgttggtaccgttgtttatcatggtggcggtggtttaccaatatatgattcacctgttactggtcagcatcaaattgggacagttgaaaatggtcaaaagatcaagttaggtaccgttgttcatgatggtgattcaactccagtcgatgctgatggtaatattggaaaagttattacaactgttggtggccatgattggtatccaattgaaggcggtggctggatagatgctcagtggattcatttcgataaaactggagactatattgttaatcctgcttctggtcacgttactgtagatgcttcaggtactaaaacagcaggaactaaataccctgcttctggtcgtgctgttgttacctattatggtaatggtgataaaatccatgtttactattctccatatcaaggtggcgatcactacagaactggtaagactttaaagaatggtcaaaaattcacttatgattatattgcctgtgatgaaaacggtaatttgtggtatcgaatcggatcccatgaatggatttatggccctcacatttctttaaataaatcaagttcatatgcttcttatccatcacacggtcgaggcgtgatgaagaaaaatcagcaacaatatgtaatgaataagaagaccggtcgaattgagccatctaagaagcaaataaaatgggtttcaactagaactaagcgaacacctaagtacttaaaacgaagaagaaatggaaagacttacaaaatcctcaatccaagatataaggaatacagaaagaaaaaggtcagaacaacagttaagcgtggagtttataatttgaattatggccagattgtccagggtggcgtaacttactacaagacaagtagtggtgtttatgctaagtcttcaagttttgattggaaagctgaccagtctgtaaaaccttatggaccatcaaagattttagctcaaactgcagatatgaaaggtaaggttgaagtttattcggctccaaccaaaggctcagctgttaattgggctttgaaggatggtactggtgttgatgtagtaagtactgctaaaggtgctgatggtaaagagtggtattacgttaagtatgatggtgacaaatatggatacatccctgcaaaacttactaatactaagggagatatcgatgaagaaccacatagtactgaagctgattctgatacagatgatgattcaaatagtactggtcaagatgcacaaaccattaaagtaactttacctgaaaagattttgattgctgataactgtattggcattgaaaatcaacgtgttttgaacttagatttaagttcattctttaagcatgattacaatgatacttcaggcttacaggctgatggtacttggcaaatgactgatgaagatgtatctcaattacgtgaattagctaatgatgctatgattgaacatcaaattggattacctccaacttcaattcaagtaactgcagaacaaatgaaaggtgatttagattttttaaatcaagtttgtttgaatgatcgaattggtgttgaagatgataatgctggtgttcacactacagcagaagttacttcaactgaatgggatgcattgaatcatagatatatttcaataaatattggtgatttacctaaaacctggcagcacttattgaaagagcaaactcagcaagaaataagacaagctactagcaacactaatgaaagaatcaaacatagtgatactttgattggtcgtgcagaatatgccttatctttggaaggtgatgctagaagagcagcacttgtagccatgatgaagggattaaaacttacggataaaaatggcaagccattagtttcaattaaaaaattcaataaatacttgactgaatggtcaggtaaggttttgaatcttcaaaattgggttgatggtacgaaagatgccgttatacgtggtgtagatgctgatggaaaaatcgattgggaaaacgcagtcgatttggtagctaaagatgaaaattctgaaatgcatttcaatgtaaatggcttgtcctatcgcgatccaaaaactcaaaaaataagaactgccatgggtagtgatggttcattttatgcagaacatggtatttttggagatcttatcactcttaaaggaacaatggtacaaatggatgcggctcttagatgtgatactggcggttttgaaataactattggacaaaccaataagtatgaaactggaacattcgactctgaaaaaggattgacggttggtagtaaaaattatgctttgggcttgagctctggccaattaatcatttcatcaaaagaaggaggattacatactggtaattatggaccttcttatttgagattgatgtctcctggagggcatgaactggaattaaatactaatacagcaacttttagatatgatggccaaagatttattactagttctgacttagaaaaagtattaggtgaattgcaaagtatcaaatcgttaatggttactcatgatgaaatgaataagtccatagaggattacctaaagactcaaactaaaggaaagaagtaaataaatgaaaaatgatgataaagtaattgcacattttggaacagaaatggcaaatataattgctgaacaagcgttaacgatttccaagttaaaagttttgctcgagcaagaacaatctaagaatgctgaattaaatattcagattaaagcattgcgaaaggaagataagcatggccgatctgatactaagcacaaataaggcttattcaaatgctgaactgattagagtaaggcaagacgattatggtcaaaccattacggctttgatcactgataaaaccaactcaccaattgatctttcaaaggctgaggtttcatttaacgtgaaagattggtcaggtgacgtaatcagtgataaggctacaggggatgtatccggcaatgctacatacgcaattaataagagtgtggcacttgctacaggttcagcatggtttgaaattaaaaataatgatcaaaaagttgcaactcaatcattttggattcaagtcatggaagcagcagaaaaagttgtacaaatggccgatccatttggtggcgtttcaacaaattaaaagaatcaatgattaatttcgttggctctttttgattagaaaggaaaatttatatggcagttaaagcagatattacgattgatattgataagcaagttggtgaactgcaaaatctaacacagatttataatgcacgtgttggtgataataagacaccactgacaatcgcttggcgtaaaaatgatttgcctttaaatttaaagggattacatgcctacattgttggtaaaactggtgatggttcatataacagtgaaactggaaaaattgattttccaattaatactcctgtttctcaatttgaagatgatggatcaggaactttggatggtggccaaagtggattaactactttgctaattcctaaacaaatgtggcagaacagtggtttatttgctggatatattggcttgaaatcagaagatggttcagtttttacttccaaagatatttggttcaaagttttaggcaacgttctggatgccggtgtagaaataaattacttcattggtgattttgataaagcattagcagaagcagaaaagaagcttcaagataagactgatagttttgatcaaattaccaatgcagccttaagtgatttacgggaaaaatatagagaaatagcacaatcttcagaggatctggcttcagaatataccgcaacattaaataatattaccgactctctaaagagtatgcaggcatatattgaaacacataatattgttactacggataaatttgaaaatctggataagtatttaactaataaagttgctacttcttatgttcaacctcaagcctttaacaatttagatgatttaaagcaaaaatatccaaatggatcaaatggtattatggtaaccactgacaatggccattattatttatggaacaataattcttggaaagactgtggaacatatcaaagtacaggaattgcagataagagtattcatttagaaaatttaagtgatacattagaaaatagtctttatccaaatgttgatgaagttgaaattacaaatctactagatgggtatttttcaaaatatggaactgtaattactcaacataatgcctctgatggtgaccctgttcatacagaaaaaattccagttaaaccgggcgaagaatattatgtttacacaaataattattgggatggaaaagcaattaatatgatggaaaatgatactattattaattatttcccatctgaaaatgatgcacaaattaagtcaataaaaattaccataccgaataacgttgattcgttaattcttaatgggacaaaacaatttgttcctcgtctgtttaaaattaatagttataatcaggatcaagatgctatagataatctagcaattattttaaaagataaggaatttaattttaaagaaattaatttaacacaaattaataaaacaggatattgggactatacaagaaatggaaattatacagatcaggctcctgataataaaaatgcaatgaaatcatatcttcctgttaaggttaagccttttgagatttacagattaacgggttgcagtgcatggaatgctagactttatgaaattatagattttcaaggccatctgatttcttgttgtgataatgaaaatagtcagagtcttactacaactttcatgattccaaagaatgctgcatatcttgaagttaatgaatatttcttaaatgtacaaacaaaacttgaaaaagctgtttcgattaaagaaaagaagcctttggacggcttacattggggagccatcggtgattcttggacagccatttttgataaagatggtaaaagctatgtcaatgatgtagcggacattacaggcattacagctactaacttaggtgctggaggcactggttatgttactggtggcgcgaataattggaacaatcaattctttaagcgaaatattgatgctgacactgatatatgtactatctttggtagctttaacgatgcttattatcctgattttaaatttggacaaaaaggtgatactgatacagctactatgtggggcgctatgcttgcaacaattaataattgttataagaataatcctgatgttctaattggtattatttcaccaggtccatggggagcaattaatccatttaagacagatacaatgtcaaagctaaactcacatagtgatactacagttaacaatatggcaattaatgatttcgcagaaaaatatgtacagactatgaaagaatttgcccaaatgtactcactaccttttctagacttgtaccatcaatctaacttacggccatggaatgatgacttcatcaacaaatattatcatggtcaaagcgctacagatactacgcatcctaatccaaatggactaaaaaaatatatagcgccacgaattgcaagttttcttgaaaagattatcaaatgattggaaggtgagccttatgatcaagcgttggcgtaaattgagtgcgctagaaatgtttgttaatctaggacagctaggcatttcactttgggtgattgctatcggctgttttttaattggggacaaacattactttttctggccaccaacttttagaaatattgaaaatgatacaagaattgacatgctaattatccttgttggattagcactttttttatgcactatttttctagttgaaaataaatatgtcattgtaactctatttactttagttggtgcaatttcattagcacttgctgcactatcaggattacatgcttattttgcaggacattgggaaatgggtatggatgtggcacatgaattagcactgtttggagcaactttactggtcggccactttaagtgaggtgattcgcttgcaagatctaagtaacttgatagcaagtattgcagctttaatgggggcagttagtgctttctatcaggtaatcatgaaaaacaagcgaaatcctccaagtgatgaaaaggaactggatgaagctaagaaagaaattgaagatttaaaaagtgaattgaaggggaaaaataaagatgaaaactgaaatcgtaattaatttaatttgggctgttgtacttgttttagcaatgtttattggagcatggtataagaataatcaagctaaagttgaaaagatcagacttactcatcctgaaatggggcatgtccttgatattgttgggatgcttgctctaaaggcttccaattatcaggaaactcaagatgataaaaacggtgatcaaaagttagatgatgcaactgattcagcatacaatcaaattaaagctttatatccagctatttctattagtaaagatacagttcgtaatatggtgcaatttgcgtatgatacaattgtggccaaaacaaatactgatctaaaacaagaacaaaataatatggccaaagttaagaattcagataatgccgagcaaaagaaggatgatattgtaaatgattagtaagaaaagttatggagtagatgttgctaaatatcaacctgagtcattaagagtatacgctaaagctggtgctaagtatgccattgtccaggtaagcgtatctaactcaattgttgctcctagagcaaaggcacagattacaagtgcaaaagctaacaatatcatgccaatgggttatttttatggctgctttggtcatagtgctactcaagccgcgtcagaagctcactttgcaattaagaatgcaaaaagtattggattgcctaaaggctcatatcttggtgtagactgggagagaaccgataataatgtgaacggcaatgttagtcaaaacactgctgctattattcaagcaatgaaagttattcgtgatgctggttatattcctctcttatattcaggggcagatttgctaagaaataaaattaataccaagcaaattattaaacagtttgggacttgcctttgggttgcttcatatcccgtttccagtcgtgtgaatactgctaattttaactacttcccatcaatggatggtgtagcgatttggcaatttaccgataattggcatggtcttagcgttgatggtgatattaacgttattgacttaaaaggtaccacaaaaaagtatgcttcaaaatctaagtgggttaaaaaatctggcacttttattttaggtgaagctttaaagattcatacttcacctcatattaattcacctgctattgctaagttgcaaaaaggtagtgtgattaaatatgatgcaactttacaaggaccactgcgtctttggttacgacaacctcgtaacaatggaaaatatggctatgttgttggtaaagataagtatggaaaaaagttaggtaaattcaagtaaatcatagctgctgagagcgtgattctatgacgctcaaattttgatttgattaaattattaaacttggcaaaagaaaacattagcaacttactataaagaaagatccgctctaggggtaaaactctagagtggatctttttttgcgttttattttaaaaattatgaaaaatcattataatctattttataattcggtttaagattgaaaaccgaaaaaaccgaaaaaaaaccgaaaacttcacggaatttggaggattttgaaagaatgacagagaataataaacaagccaaaaccactgataccaagggaaaagccaactgcgacacagcaatcttcgctggcggttgtttttggtgcatggtcgaacctttcgatacagttgacggagtagaaaaagtagtttctggttatactggtggtcatgttgctaatccaacatatgagcaagtctgttcaggtacgactggccatactgaagctgttgagattacctttgatccagcaaaaatatcgtatgatcaattgctaaactattattggcaagtgactgatcccacagatgcaatggggcaattccaagatcgtggtgataattatcgacctgtaattttttataattcacctgctcaaaaagaagcagctgaaaaatctaagcaaagattacaagctagtggtaaatttgataaaccaatcgtaactaaaattgaaccagctaagccattttatccagctgaggaatatcaccaagatttttataaaaaagatccacttagatatgcaatggaagaagctggtggaagagctaagtttatcaaggaacattgggattaataaaaagcagatcataactgttataagctgtgacctgcttttttactttcaatattttagattatgttaactatttctttaagttgcttttgataacctcgattggattgagccaagttccgttgttaacgttccaattcttacatggaaaaccatatttgtttatgtaatctttatttgtttgagtaacgccaaggtgtaagtgtgagccagttagcttaccgatcttttgacctaatttaatcttttgaccagtcttaacataaatgtcttttttcttattaaacccttcttggtaaacttcaacgtaattatcaggactaataacccagatgaaccagccaaggccgttgccataagcaacctttttaacagtaccttgatgaattgcatatacgttagaatgcccaacttctgaaaaaccaaaatcccaaccatcatgaaagtaggaaggtggtgtagtagaacgcatatagttagttatgccaaaagtttgtgcattatacattggacgaacaccatttttcttgttggctttaaacggataagcccacttgaggttcttgggttgaacttcagttgtattttgtgagtcatcaagcgtatcagcagaagcagtggtggttgataaaccaacgcttgaagttaataatgcagtacctaacaaagaaattattaatttacgaaatttcattataaaaagaaaccagataagttctgatttttatctcctctcttaattcacctaaactattgtagctcagcagttttacgagaaagttacaattaaatttcgattaataacaaaaagttagtatgagtatatgtgaatatgtttttaattacgagtctaggtatttttgaaatttctttactttattttgggatttacatagaattaaattaataacgtttacattgaatttagtaaatgatagtagacattaatttggctcaaaaataataatttggacaatgaaagtgaaactgtcaaatcttttgtgtaaatagatctttctcgtaaattgattttttaattatttatttaatcaaagtaggattctaaggtgtcctgaacctgaccaaagcctttatgaattcgattgaaataacggtcattgtagctcattgcctgaatgccaataaaagcatcaagcgactgttcagttggaaactctgccttaggcttagctttgcgcttgatcacattgttaaatgattcaatcatgttagtcgaataaattgaagctctgatctgcttgggatagttataaaagaccagcagatctggttctatgtctttcaagcttctgataacatggctgtaaaccttgccccatttggtatagaagtcatgcaggacagctgtggcttcttctttgtttgtctgttgatgcacctgtttgaattcgttcatgatcttttcacgatcgtcgacgcgtactttagcgcagatattgcgcatgacatgaaccaaacagcgttgaaaatgagctttaggataagtcctggccaaggctgttttcatgccaacaacaccatcagaaagaaaaagctcaacttgctttaagcctcgggatttcatgttttgaagcatatctgtccagacttcaatgttctcgctaggcgcaatgcagtagtcaatgacctccttgtgcccattaggcttgatgccaatggcaatatagactgcttcacgctcaaatgtttctcggcgcaaaggaaggtatgccgcatccaaatagacgcagaaaaacttgtcgcttagcttgcgtttgtggtaagcctcaacctttggaatcatctgcttggaaatatttgatacctgagctggactgtaatggctgccatacatcttttcaattagatcggctatttccctggtggtcacgcccttggagtaaagcttgataatcatgctttccaagatatccgagtgctgcttgtagccaggcagcgtgtgctgatgaaattgaccgttgcgatcccgaggcacttgcacttcaattgggccaaattgcgtatcaactttgcggaaataagcaccatttctagagttgccagtattccagccatttctggcatagggatcatagcccagaaaggcagtcaattcagcttctaacaagttattaacagcctgttgtagctctttgcgcaataaatcatttattttgtctggattgaatagagcttgagcaaaatctttggtaaaatcattcatgaaggagttcttctttctgtatgtgtttttttgttcaaaccaatcatacgagaaaggaactcctttttctaatgtttaaagaaataaatttaaggaatcattcatccttacacaaactattttacagtctcgaagatgttcttccagcaaatagtcttttatatcaaaaatatactgttttggatgaattaaataaaatcccggatttaaaattgaagtgcaacactaagtgttaaacaaaaaggccatgaagacctaaacttgaagtgacgaaaaatcaagaaaggaagatctttatgaccaattcaaattctagcatttctaagcactatcatcaattaaccagcgtacaacgtggacaaattcaagcaatgctggattccggcataacttcccgtactgttatcgctcaagaagtcggctgccataagtcgacaatcagtcgcgaaatcaaacgcggaagtgtcctgcaaagagacagcagctatttattgtatgagcactattacgctgatactgcacagatttattatgagaagcgtcgcaaaaactgctatcagcgcaatccattgaagcattatgctgtctttttgagaatgctctccagacgctttaaagctaaatttgatgccaccagcatcgatgagttcgttggtgaattcaaaaggactatgccaggctacccttgtcccagcacaccaaccgtctatcgctatattgatcagggcttgctggacataagcaatattgatctgcctatgaagctcaaaagacgcaggaacaagcgtcatcacagccatggcggtcacgctttgcacaagaagcatcttggcaattccattgaacagcgtcctaaagagattgaagacagaaaagctccgctgcactgggaaggagatctggttaaaggcgtcagacgcaagaatcagcctgctttaatgactttgactgaaagaaccacacgctttgaagtagttatcaagattcctgactatcgggcaagcacatgccaaaggctgcttcaaaaggagattgacagacatcctgcctggtttaaatcaatcacgtttgacaatggctctgagtttgcggatatgaccaagatcaagggctgccagatttactttgctcacccatattctccatgggaaaggggcaccaatgagaactgcaatggtcttttgcgtcaattcttccctaagggcaagagcatgaaagacaagtcaaaagcttatgttcaacaggcaactgatgccattaaccacaaatatcgccgaatcctccaatatcacacagcagaggaactcttcaagcaatatatctcttcataacctaactgttgcacttaatttgacaattcaggtttgaaaagaataaaattcgattgcaacttaataaggcatataattacaaatatatgcttgtatctagagatacgacaacaaagaatcaagagatgtttggaatgactatatatcctcgggctgaacgggatatagcgaagagtcgtaaattaattgaaaaacgtaaaggattttcaacagatatttatggtggctatactggtactgcagcagcctatatggcaattgtaagaattaataagactaaatcttcacagtacaaagtaattgctgtacctatgacgaagcgtgctattttaaataaagctgaaaaagaaggtaactatgaaaagattctaaagcaaattttatcaccaagtattttatacaacgataagggaaaacgaaaagcaggagtaatatcatttgatattattaaaggtaaagttccatataaccaggttgtgcaagatggcaataaaaaatttttgttaaagagtgctatttatttatgtaatgcaaaacagttggttttatcagaagaggcaatgagagtaattactggtcattggctagattctgataagcaagatcaagaacttttggatgtttacgatgaaattttagaaaagattgatagatatttacctttgtttgacattagagattttagaaataaattacataagggtagagaaaaattcttgaaattaaacgctgaggataagtttaaagctattattcaaattttgaagggtttgcatgataattctgatacaggtgaacttaaagatattggtataactgtaccatttggtcaacttcaaaataattctggaattacattatcttcggacactattttagtttatcaatcacctactggtttgtttgaaaaacgcgttaagatttctagtttataaaaataaatgaggaaccgacatgtggttcctcatttttacataaaaaaagtccctcgatagctcgggacaagtgttgaaactctgcgtactaaaacgcattgcttgattttaaattatgattgttagatcaataaggttaagagttgggagctacccaacaaataaataatatcattatagatatagatgtacaaggagaaaaaatgggatggcgtaacgtaataataactcagcatgcaaagctaacatactctatgaatatgcttatagtccaaacaaaagatggtattaatcaaatacctattgaagatatcaatttggttttaatttcaacatcacaggctgtgattactagtgctttgataagtaagttagccaaaaatcaatgcaaggtaatctttgttgatgataaatatcaacctgttacagagacagtgaattattatcctggggctagggacataaagaagttgaaaatgcaatttgaatggaatgaaagaagaaaagaaaatttatggaccaaaattgtagctgctaagctaaaaaatcaaatatcggtgttaaaaaattatcgaattgatgaaactgaagttgagcaagagctgtacaagttagaggtgaacgatttatccaatagagaagcagcggctgctagaaaatatttcatgaagttatttggtaaggactttattagaagaaattccggagtgattaatgcagcactagattatggatactcaatattgctttcatccttcgatagagaaattgcaatgaatggatatttgacttatctgggaatacatcatcattcagtggaaaatcaatttaatttagcttgtgatttaatggaaccatttagatccatagttgattattgggttaaggcacacgaaaatattaccagttttacaccagatattaagtatggattagttgagttgcttagcttacaaataaaattcaatggtaggaatacaattttaacgaatgcaatttctgtatatgtaagaagctgccttagatatttaagtggagaaacagatgatattagaatagagatgagtttgtgtaatgaggtaccgaatgatgcgattaatgataatgtttgatttgcctacggacactgccgctgaaagaaaagaatatcgacaatttagaaaagctctaataaatgaaggatttttaatgattcagttttcggtgtatgaaagagtatgtgtcactagacaaacagctaattttttagaaaagagaataagaaaatttatgcctagcaaaggtgttgtgcaaagtctaatggttacggaaaaacagtacagtgatatgcatttcttggttggggatgcagtaaaagatattcgcaatacttcagacaggacagtgatactatgattgtttcctatttgtcacataagaaaatctgtttaaaagatggaattaatgttatttgcactcaaagtcccattgcctataaagatctggttttaggttttcaagccttaaatgatctaatagtatgttctgatgacgaatacaacaataagtctattagtaagagttttgattttgtaggagccccgttgttaaatgacaatattatggcaaagtatatgaatgtcattattaagaactttatttctaacttggatgaggtaaacagaaatagaattttaaaatctttttattcattagaaacagtattgaatgattctttgcttttggaagatttacctttagaaattgattttagcgaagatattaaaaagctgttgaaaatggttaacattcatttagatgctcaattaatgttaacgagactgtaaaatagtttgtgtaaggatgaataattccttaaatttatttctttaaacattagaaaaaggagttcctttctcgtatgattggtttgaacaaaaaaacacatacagaaagaagaactccttcatgaatgattttaccaaaaatatagcacaagctctattcaatccagacaaaataaacgatttattgcgcaaagagctacaacaggctgttaataacttgctagaagctgaattgactgcctttctgggctatgatccctatgccagaaatggctggaatactggcaattctagaaatggtgcttatttccgcaaggttgatacccagtttggaccaattgaagtgcaagtgcctcgagatcgcaacggccagtttcatcagcacacgctgcctgactacaagcagcactctgatgttttggaaagcacgattatcaagctctactccaaaggcgtaactaccagagaaatcgctgacttgattgagaaaatgtatggcagtcattatagtccagcccaagtatcaaatatttccaagcagatgctccccaaggttgaggcttatcacaagcgcaagctaagcgacaagtttttctgtgtctatttggatgcgacataccttcctttgcgccgagaaacgtttgagcgtgaagcagtctatattgccattggcattaaacctaatggacataaagaagtcattgactactgcattgcgcctagtgagaacattgaagtctggacagagatgcttcaaaacatgaagtccagaggcttgaagcaagttgagctctttctttctgatggtgttgttggcatgaaagcggccttgaccaggacttatcctaaagctcattttcaacgctgcttggttcatgtcatgcgcaatatctgtgctaaagtccgggtggatgaccgcgaaaagatcatgaacgaattcaaacaggtgcatcaacagacaaacaaagaagaagccacagctgtcctgcatgacttctataccaaatggggcaaggtttacagccatgttatcagaagcttgaaagacatagaaccagatctgctggtcttttataactatcccaagcagatcagagcttcaatttattcgactaacatgattgaatcatttaacaatgtgatcaagcgcaaagctaagcctaaggcagagtttccaactgaacagtcgcttgatgcttttattggcattcaggcaatgagctacaatgaccgttatttcaatcgaattcataaaggctttggtcaggttcaggacaccttagaatcctactttgattaaataaataattaaaaaatcaatttacgagaaagatctatttacacaaaagatttgacagtttcatgttaacaccatatgctataattgaaacagttcttaagattcatcaagaatataatcttgatagtattcccgtgttttgtaatgtagctcattaccttgatgaaacacagttaaaagaacttagtaagattgttagacaacttaaattgaaaattattttaattgaattcacagataagaaatatggggtagcagtcaaggatgctcaagttgcatatattgatcgagatcttgttgattggtattagacaattgattaaaaagatattatgaaatatcggttttagatgattgttagatcaatgaggtttagatctagaagatggtacaaataaaccattttctagttttagatgattgttagatcaatgaggtttagatcaaatgcttttcacgatggaccggatttatagttttagatgattgttagatcaatgaggtttagatcaatgggcgacttcttttattgttgggaaacgttttagatgattgttagatcaatgaggtttagatcccactatcgcgcctggaatacctgttttctgttttagatgattgttagatcatgggagtcagaacagtaatatgcataaatttacaaatatttttctgtaaataaaaatcgctctagagaaactctagaacgatttttggacatacttgatcttagtatctattattacttagcgtaatcatcaatacccaagtgctccaaaataagtgcggcagtttcttcaatggagcggtgagcaacattaattacatagcaacctaatttcttataaagtgcttgtgctgattcaagctccttgttgattgaatccatattagaataagtagtatcaggattcaaaccataagcgatcattctttgacgtctgatttcgttcaatacagatggatcgttagtcaagccaataatcttcttaggatcaatttcgtagatttcttttggaatgtgagtttcaggaacaagtggtaaattagctacctttaagttcttattggctaagaacaaagaaagtggagtcttagaagttcttgataccccaagtaaaacaacgtcagcttccaagaaaccttttggatctttaccatcatcatacattacagcgaattccattgcggaaattctgtcaaagtacttttgatttaagctatgctgtgcaccaattttttgatctggtgtcatatgagtagtttgttgaattgcttcaactacaggtgagaagatgtcaacacattcaacattatgctcacgggcaaatttgataactggcatttgcatttcatctttaaccaaactgtagataattaccaagtttggatatttttcaatttctgttaaaacttcgtccaacttcttttggttagtgataaaggggtaacgacgatagttgatattgcagttaggaaattctgcagctgcagctgtggcgttactaaaagcagtgtcaccagccgcatcagaaataataataatgtttaattcattttggtcttttgtttctaccatattaagctcctcgtgtattattaaatatctttctgaaaataattatactattaatgaaagcggattaacaataaaaactcagctcttttattaaggtaaagtagtcggtttacttaacttaaaaatttatcaaaaagtttttgaattgtattgaccctaaagattagtttggtataatttaagtaaatgtatggcgtaacgccaagaaatggaaggagggatcacacatggctaagacaatcgttcacgaaaacgagtctattgatgatgctcttcgtcgtttcaagcgttccgtttcaagaagtggtaccttacaagaataccgcaagcgcgaattctacgaaaaacctagtgttcgtagaaagttgaagtctgaagctgcacgtaagcgtagacattattaataaactactgagaaagctacctgtttttgggtagcttttctttttgacttcttgaagcataattttgattatgttaagtaaatatttgttagttttattttagttaagaacatagtttgttataatactattgggtttttaatagaaagaaggatattaaatgagtttgtcagatcaaatcatggctgatatgaaatcagctatgaagaatcacgacaagacaactcttaatactgtccggatgatcaaatcggccttaatgaatgaaaaaattaaagcaggacacgatttaactccagatgaagaattaactgttcttaatcgtgaaaagaagcaaagagaagaatcgattgacgaatttattaaggctaatcgtgatgatttagctgaagaaaccaaaaaagaattagcagttgtagaaaagtacatgcctaagcaaatgaatcaggatgaacttagagcagctgttaaggaaacaattgatgaagttggtgctaaaggtaagtccgactttggtaaggtaatgaaagctttaatgccaaagattaagggacgtgccgatggcaaggctgcttcgcaatcagttcgtgatcagctaaattagtagtaacaagaaggagcgggtctatttggctcaaacaacttttacacctcaaagaccagaaaatattcaaaaactagttggagttaatgacggaaatttaaagcttctttctgaaggttatgatatttctgtgtcagatgtcggtaatgagattgtcattgcaggagacgatgaagagaagatcaagaaggtagttgctgttctaaaggcactcgatagtgttgtgaatactggtgttaacatcggtgcgcccgacacagtaagtgcgatgaagatggctgacaagggtaccacagagtactttgcagacctatataaaaaggttttgattagggatgctaaaggtagacctatcagagtcaagaatatgggacaaaagcgttatgtcgaagctattgataaatctgatgttgtctttggaataggaccagctggaacggggaaaacattcttagccgtagtttgtgcaattgccgcctttaagaagggagaagtttctcgaatcattttgactaggccagctgttgaagctggtgaatcacttggatttttacctggtgacttgaaagaaaaagtggatccatatttgagaccaatttatgactccttgtatgctattcttgggactaatacgactgaccgtttgatggaacgaggcgtaattgaagttgctccacttgcttatatgcgtggacgaactttagatgacgcttttgtaattcttgatgaagcccagaacactacagatgcccagatgaagatgtttttaactagacttggatttaattctaagatggtcgtaaacggtgatatgacacaggtcgatttacctggtcgacagcatagcgggttaattgatgctagacatatcttgaagaatatcgaccaaattaaatttatcaacttttctgctaatgatgttgttcgtcaccctgtagttgcgaaaattattactgcttatgaaaaagaggacattaaacactaaaaatggatccaattgatattacttataatgatgaagttggctttttagatgatgaaaagcgtaactggcaagactggattatgaaacttttgctgctagctaagaaggaaattggcaaagataacaacttagagatgagtattaactttgttgacgaagatcgtagtcatgaaattaatttaaagtatcgtgacaaagaccgtcctactgatgtaatttcctttgcaattgaagatggtgaggattcaattgatcttgcagcatttgcagatgatccagactttcaagaggatatcggtgatctatttatgtgtcctagtgtgattaagcgtcacagtaaagagtatggtacaggttttgatcgagaatttggatatacaatagtccatggctttttacatttaaacggctacgaccacattaagccggatgaggccaaagaaatgtttggtattcaaggaaaagtgttagaagattatggtttgccattgtatcctgatcaattagatgaaggcagaggtaaataatggaagaaaaagagtttaagtctggctttgttgctttagttggtcgtcccaatgttggaaaatcaactttaatgaactatttagttggtcaaaaagttgccattacgtctaataaaccacaaacgactcgtaatcgcatttcgggtatttatacttcagatgaaatgcaagttgtttttgtagatacgccaggtatttttaagcctcattcaaaacttgacgactatatggataaggctagtgtatctagtttgaatgacgttgatttagttttattcatggttgaacctgaggaaatgggtaagggcgatcaatacattgccaacttgttaaaagaagtaaaagttcctgttcttttagtaattaataaagttgatgaaattcatcctaataagcttttgccaattatggattcatatcacaaacttgagggctttaaagaaatactaccgatttctgctactcaaggaattgggattgaagatctgcttaaaacgattaaggaatatttgccagtaggcccacaatattatggtgctgatcagatcacagatcggcctgaatattttgtggtagccgagttaattcgtgaacaaattctgcgactgacttcacaagaagtaccacatgctactgctgtcgcagttgatcatatgaatactcatcaaaatggcaagctcttgattgaagcgactatctatgttgagaaagacggtcaaaaaggcattattattggtaagggcggtaagatgctcaagcagattgggattaattcacgtcaagagattgaaagattgcttggtgaaaaggtcaacttgcgtctctgggttaaggtccaacataactggcgttctgaccctaactttttaaagcgaataggctatgacaaaaaagaactttagttgaattactgttgtataagcgttgtcgaaagatgacgtcttttttgtatgtttagggagacaagaaaattctattcgttggataactaatgggataaaaatagatacaatagtaatgacaaagtgatgaaattttgggatctattgttttgtgattgttgttatattgggatttgtttactgtattctccacgtatgtggaggctgaaacccagtttcgaagttgattctgggtaaagtcttggtattctccacgtatgtggaggctgaaacagcagtctttttgtactatagactatttatgatattatgatatcttcatcagaatatctataaaaaatgaattttaaatactaaaggagtcatgatatggcacgtgaactaaaagaagttcagggtattatctttaaaaggcagaaatataaagaagcagatttattagccaaaattatgactaaacaagatgggattatgactctgattgttaaaggagccctgaggcctaaatcaagattaagtgcagcaacattaaatttttctattggtacttacgtaatttatacgagcgaaaagggcttaagtaatttacgcacatataaaggggcaaggcagtttgatggcttatataatgatttaaccaagaacgcttatatttcttttatttttgatttaattgatcacgcctttgtagaatatcagccaattggtaaatattatgatttagctttatttgctttgaaaaaaatagatagtggcgttgatgcagaaatgattacacaaattgtgcagatgaaaatattagcagcatatggtgttgagccacagctaaagcattgtgttatttgtggtaaggaaaaaggcgtttttgattattcgattaaaatgggtggagttatttgtagcgatcattttagtacagttactagccgaatgcatttaaagccaaaagaaactgctgtaattagaacaattggcttattaccgattgagcgattaggcgatattaaaattaatgaagaaacgaagagggctactagaaaagcgattgatcgtatttaccatgaaacgataggcctaaatttaaagactaagaaatttttagatgaattaaaactttttagttagtaaaaatctggttttaccatgacccatgtgttaaaataaaaacgtatttgacgatgatgaggatttaagaaaagtactagttcagcgaatgtcggtcggtgtgaggacatctaggaaaaggcacctctagtcatattgttcaattaagagcaggaaggatacttcctgaattagggtggaaccgcgataatatttcgtccctatgcaaaattttgcataggctttttttatggcctagcgcaggaggagattaaaggaaatggcagataagaaattaaatattcagaatatgatctttaagctggaacaattctggtcctccaaaggttgtatgattatgccttcatacgatgttgaaaagggtgcgggtacaatgagtccttacacttttcttcgtgcagttggtccagaaccatgggcagcttgttatgtagagccttctagaagacctgcagatggtcgttatggtgaaaaccctaatcggttattccaacaccaccaattccaagttgttattaagccagctcctaaggatattcaacaatattacctagacagtttgaaagttttaggtatcgatcctttggaacacgatattcgtttcgttgaagataactgggctaacccatctatgggttgtgctggtgttggttgggaagtatggcttgacggtatggaagttagccaattcacatacttccaagttgttggtgaattagatgttaagccaactatgagtgaaatcacttacggtgttgaacgccttgcgtcatatattcaggatgttaactcagtatttgatcttgaatggggtaatggcattctttatcgtgatatcttcaagcaaccagaatatgaacattctaaatatgcatttgaagaatcaaatcaagaacaattgcttcaattctttgatatttatgaagcaactgctaagcgtttattggataagaacttggttcacccagcatatgattacattttgaagtgttcacatacttttaacttgcttgatgctcgtggtgctgtttcagttactgaacgtgctggttatttatcaagaattagaaatcttgcgcatgaagttgctgtcaaatttgtcgaagaacgtgaaaaacgtggcttcccattgcttaaaagtgcagaagacaaaaaggcgggggtagaaaatggctaaagattatttatttgaaattggtactgaagaaatgccagctcacgttgtaccacgcagcgttaagcaattagctgacagaacaagaaaatttttaaaagaaaatggcttgaaatttaaagatattaagactttttcaactccacgtcgtttgactattttggttgaagatttggctgaaaagcaagacgatattgatgaagttaaaaaaggtccagctaagaagattgctcaagatcaagatggtaattggactaaggctgctcaaggatttgctcgtggccaaggaatgactacagacgatatctattttgaagaacttaagggtactgaatacgcttatgttcacgttcaaaaggaaggtaagaaagctagtgatatcttacttggtatgagcgatatcattaaggcgatgactttccctactaagatgcgttgggattcaaatgattttgagtttgttcgtccaattcactggcttgtttcattatttggcagtgatgtaattcccgttaagattttggatattactgcaggtcgtaaaactcaaggccatcgtttcttaggcgattcagttgttttggccaatgctgatgactatgaagatgcattaaaagatcaatttgtaattgctgatgcagatgaacgtaaagatatgatcgttcgtcaaatgaatgaattagttaagaagaacaactggcaagttaaaccagatcgtgatttactagaagaagttacttatttagtagaatatccgactgtatttgctggttcatttgatgaaaagtatttgaagattcctgatgaagtgctgattacttcaatgaaagacaatcaaagatactttgaagtctatgatgaaactggtaagttaattaatcactttattgctgttcgtaacggaaataaagattaccttgataatgttatttcaggtaatgaaaaagttttagttgctcgtttggacgatgctcaattcttctatgatgaagaccgcaagtatccacttagtcattttgttgatcgtcttaagaatgtttcattccacgataagattggttcaatggctgaaaagatgcaacgtgttcgcatgattggtgattacttagctaagcgttgggatttaccagagaatgtagtcaaggatttcgaccgtgctagtgaactttacaagtttgacttagttacccaaatggttggtgagtttgcagaacttcaaggtgtaatgggcatgcattatgctcgtcttgcaggtgaggacgaagaagtttcagttgcaatcaaggaacactacatgcctgccactgctgaaggtccacttcctgaaactacggttggttcattattatcaattgctgataaaattgatacaattgtaaccttctttggtgcaggaatgattcctacatcatctaatgacccatacgcacttcgtcgttatgcatatggtattgtaagaatcttacttaatgagaagtggtcattaccatttaacgaagttttaccagaaatcattagtatgcttaatggtgtaactccagctaagctacctaagagtgatgctgaccaggaaattgcagacttcattcgtgatcgtgtcaagcaatacttacaaaagaatgacttcaagtatgatattattgatgctgttcttgcttcaagtcaacaagatccaagtcaaattttagcagcagctactgtattgcaacttcaccatgatgatgaagaattcaagccagtagttgagagtttgactagaattgataacatcttaaagaaggctaaatttaagagtaatactgctgttgatgaaagtctctttgatgataacagtgaaaaagaactttacgctggcgttcaaaacttgcaagatattgaaagtttggctgatctctaccaaggttttgttcaactgcaaccagtgattgatcaatactttgaaactaatatgatcatggctaaggacgaaaaggtcaagaataaccgattagcacaattatatgcagttaatgaattagcagatcgtttaggtgacttaagcaagttagttattaagtagttaatttagatagaaaaagggtgattcatatggctggacggattcctgaagattttatttcagaggttcgcagtaacgtcaatattgttgatgttatcagtcagtacgtttcgcttgagaaaaaaggcaaagactatattggtctttgcccttttcatcaagaaaaaactccgtcgtttactgtaaatgctgataagcagttttttaagtgctttggttgtggtaagggtggaaatgtttttaaattcttgatgtataaggatgatttaacttttcccgaaagcgtcgagcgagtagctgagtttgcccatattgctatgcctaatggatatggtcataatagtggcaccaaattaaatccacttatgcaaatgcatcaggatgccgttgatttttatcatcgtgtgcttttgactactaaagccggtgaacgggggatgcagtatgctcaaaagcgagaactagatcaagaaatattagaccattttaagataggctatgcacctaaggctgataatgttttgattacttatttacgtagtaaaggttatcaagatgatgatctagcacaaagtggtttatttgttcaagctagggatgggcagttatacgaccgttttcgtgaccgtttgatgtttccattggataatgaaaatgggagaacgataggcttttctggtagacgaatttctgatgataagaccgaagctaagtatatgaatagtcctgaaacggggatttttaccaagtcaaaggtattattccactttgcagaagcaaagaaagcagctcgtggtgaaggtcacttagttctatatgaaggttatatggatgtaattgcagcatataaagcaggggtgaaatcgggaattgcctcaatgggaactagtttaacagatgaccaaatatatttgttgagacgtattactcctaatatcattattaattatgatggagatgatccaggagtccatgccgaagaacgtgctgcacgtatgtttaataaagatggcaattttaatttaggaattgtagttttaccagaaaaactagatcctgatgaatacgtcaaaaaatatggcgctgagaagtatctggaagaagtcaaaggtgccttaacgccgactgactttttcttaaaacggttggaacaaaaatataacttagataatgaccgtgaaaagattgcttatttaggtgaggccgtaaaagaaattgcacaagtgcgcaatccagttgagcaagatatgtatactgaaaaattggcgaagtctagtggggtttctattgcttcgttaaaggcaaatcttgctaaagaaagacggcgaaataatcgggcacgcaatcatgtacgtaattctcaaagaaattcacctgattatccgatagacgtacctttacctggtgatgaagacgtgcctacagagcagtcagtagttgaaaaaaatcctagtcagaccagactcttgtatttatttattcattcaactgatgctcaaaaatatatgttagaagggcaatttcattttcctaatcaggattttgaaactctggcacaggattggttaaaatatgcggaaactcatgaaaatccacaaattgatgggttcttagattttattcctgagcaacttcaaggtataatagtagatgctgaaatggcacagatgccaaaagattctacaattcaagaagttgatgctttggttctagcattaaaaagacgcaacatctattccaggctgaatgagcttcaagctcaattacaggatgctaagcgcaaaaatgatgcacaaggaattattgcaatcactcaggagattattggattaaaacggatcttaggttaataaggaggctttttagtggcagaaaaagaaactacacaaaaactatctttggataagatggttaagcaagtcgtaaaagacgtaaagaaagataagtcgatcactgaagaagatttcactgctcgtttgattaagccttataacttacaaggcaaggctgtagatcaactagtacaagagtttgaagataatggtattagcattgttgatgaaaacggtgatccttcaaagttagccttaaagaaacaaaaggatgttgaaaaggctgaattaaaggatatgtctgctccatcaagcgtacgcatgaacgatccagtgcggatgtatttgaaggaaattggtcgtgtaccacttcttactgctgatcaagaaattgctcttgccaaaagaattgaatccggggatgaagaggcaaagcaagaattagccgaagccaaccttcgtttggtagtttctattgctaagcgttatgtaggacgtggtatgtcattccttgatttgattcaagaaggtaatatgggactaatgaaagctgttgataagtttgattatcgtctaggctttaagttctcaacctacgcaacttggtggattagacaggcaattactcgtgcgatcgctgaccaagcacgtacaattagaattcctgttcacatggtcgaaacaattaataaattgatcaggatacaacgtcaattgttacaggacttaggccgtgaacctacaccagaagaaattggtgcagaaatgaatatgccaaccaataaagtacgtgatattctaaaaattgctcaagaacctgtttcattagaaacacctattggcgaagaggatgattcacacttaggcgactttattgaggataaggatgcaactagtccagaacaacacgcttcttacgaaatgttgaaggaacaacttgaacaagtacttgagactttaactgatcgtgaggaaaatgttttgcgtttgcgttttggtcttgatgatggtcgtacccgtactttggaagaagtaggcaaggtatttggtgttaccagagaacgtattcgtcagattgaagctaaggcattacgtaagttgcgtcatccaagtcgctcaaatcaattacgtgatttcatggattaattataattatctatattaaaagagctaagtttgatacaatcccactaaagtggacgattgaaatacataaagtattcaattatccatggaggtgggattttttatgtccagaaaaagtaaatattcattcgatcaaaagatatgggcagttgaacaatacttgaatggtaataggagcagcgttgaaatagctaaacggcttaagatgccaagtaaaagtggagcgatgcaagtaagaagatgggttcatcaatatcaaagcaatcgtgatacccttctaagtaatgctcaatacaataatcattactctaaggcatttaaagaaaaggttgttcaagaatatttagctggcaaaatgtcgttaccttctttagctaataaatatggcattagaagcaatggaacagtatcagaatgggtttccaagtataatagtcatatagaaaatcgggactatgatccccatccggaggtctatatgactaaagcaagaagaaaaactacccagcaagaaagaattcagattgttcaatactgtcttaatcacgacaagaattacactcaaacagctgtcaaatttgattgttcttaccagcaggtttacagctggacacacaaatatctagctaatggtgaaacaggattaacagataaacgaggcagacataagaagccagaagagctaactgagttagaactggctaatcgaaaaattaaggaattagagcgtcagctcaaagaagaacaaactaagaacgaattcctaaaaaaattagatcagttagaaaggatgtgcttgccggacaaccaagatacagacaagccgcaataaaaagacgctggaaacaagaaacatatcagttaatccatgactgccatcaaaagtacaattggaagattgatttaatgtgcaaatgggctaaaatagcacgctcagcttattacaaatactttgatcctaagcgcaagccgagtaagcgtgaagaacgagacaaaaagattgaagcaaagatcattgaaataaccaagtctaacaacagtctgtttgggacggaaaagatgaccatggcagttaatcgacagatgtctgatgaaaagccggtttatcataaaactgtttaccgcttgatgtgtatcaatggcattagatcacaaaagcctagataccagaagctaaagttcaagcatacaacgcctgagaaaacggccgaaaacaagttaaaaagagactttaatgcatctagacctaatgaaaaatggtgtacagatatcactgaagtcgttgctgctaacctgcctaaggcatatctatgtactgtgtttgatctatatgatcgctatcctgttggctacgcaattagtaaacgaaacgatactgctttagttcaagcagcctataagcaggctgttaaagcataccctaatgctcatccgcttttccatagtgatcgtggttttcaatttactcgcgcacctttccaaaaccaattaaaagaccaaggcatgacgcaatcaatgtctcgtgttggctgctgtattgataatggtccaatggaaggctggcaaggcattatcaaagaaatgcgagttattcttcatcctcaagtggccagttatgatgaacttaatgattctatttgtaagacaatagattactacattaatgaagatccacagaaacgttttaacggtttaactgctggtgaaatgcgcaaagaagcgatgaaaggcaatattaagaattgccctattgcaccaaatcatcgaattgagaaatactggcaaaaaatacacgaaaagaaaataagagaagccaaaaaatcctcagctgattattaatcaactgaggaataaaagctttatgtaattctactgtctacttgacagggaatgtatcagttttacttagctcttttttattggactggatctttacctgctgcccttagattatcttcaatgattttcattggatttaaccaagtgccattatctttccaatagtatttgcatggcgtattgtcatgctttttatcaatgtaatctttatctgtcttagtaactcctaaatgaatgtgagagccggtcagtttaccaattttttgtcccaacttgactttttgaccttttttaacataaatatcagtaatactgaggaagccttcctggtaaacttcaacatagccatcatcggaaataatccaaatataaagtcctaaacctggggcgtatttaacacgatggacagttcctgcatgcacagcatatacggaagaatgtccaacttcactaaatccgaagtcatagccatcatgaaaataactcttgctaggatagactcgacgaatgacgtcagtttcaccaaacttttgtccagatttaaatttgattttcttttcatagagcttcttaaaagggtaaccccaagtaagatgaacgacttttttctttttagcagtcttctttttcttaaccgtgtgagtttgtggtcgtaaactattcagattgttttgccataagggaatagaggcaaaagctaaaatagcaattaaagcagctaaaagtgcaaacttactttcagtttttttcattaaaatagctcatctcgctttccgtcaagcatatgttcactaattgtttgttcaaaaaatactggtaaatcatgatcaaaattgtaagctaacttttgctttttcaattctttagcactcatccaggttagtttaccttcgtctgattctttaacggtacccgaaaattgttcagctatgtagaaaaatactaaataacgttcatcattgtgatcataaaattgtttaacaccaactaattgaggatgactaatcgttaatccagtttcttctttgacttccctgacgacagaatcatgaaaagattcatgcgcttcaacatgaccaccaggaaaagtaagtcctggccagaccggatcgttgcgatcaagaactaaaacctgatctttgtttttaaccatgcacatattagttaatgtgacattttctgttctactcatgtaaaaaacccgctttctgtgacgattatatcaaatagtagcaaaataagactatgaaatatgctaaaatttggttaaccatatcttttatggaggaaacatgaatttaagattaaatacgttggcaaagatggtagatcctggcagtcgagtggctgatattggaactgatcatgcatacttgccaattgaattagtaaaaaatggcaaaattgattatgcaattgctagtgacgttgcagagggccctcttgaaaatgctaaaaatgatattgcagcagctgggttaaccgagcaaattgaaactcgcttaggtagtgggttagaaaccgttactcatgctgatcagattgatacagttgtgattgccggaatgggcggcaagttaatgactgatattcttgatagagcttggagcaaagatgcacaatttaaaactctggtactagaacctaatataggcgaagcaggggtacgtaattggctgatgatgcataattataagattatctcagaaaaattaattgcagaggctgggcatacttatgaattaattaaggctagcttaactgaagaaaagcatgagatgactgaaaaggaaatcttttttggcccctttattgtacaagaaaagaatccagttttttatcagaaatgggaaggccaactcgcttattatcaaagattcctggttaatttgaataaagcaagaaaaaaagacgaagatcgaatcaatgaagtagatcatgatattaaattaatcaaggaggaattggagaaatgaccaaagtaaaagacattgttgcgcgtttgcgacaagattttccggaaaacattgcttcacaaggtgatcctgttggtatgcaaattggatcaatggaggctgatgttaccaaagtaatgactactttagatgtacgtccccaggtagttgaagaagctgttgaaaaaggggttgatttcatcgttagtcaccatcctgtaatgtttagaccagcacaaaatttggattttgcgaatgcacaaaacgcaatgtatggcaatattatcaagaatggaattactgtttattcaattcatactaattcagataaagcccaagatggatctgctgattggcaagcagaggaactaggtctgcaagatgttgaaccattttgtctggatgatgatggaattgctatgggtagaaaaggaaagttacctagaacaatgactgcttatgattttgcctattatgttaaagaaaaaatgcaaattaaaatggcacgtctgattactgcaaacaatgaaaagccaattaccagtgtaggatttatttgtggggatggtggtaaatattggactagagccttagatgaccatttagatgcttttattactggggatgtttattatcatgtaggccatgatatgatttcatctggtttaactgttgttgatcctggtcattatactgaaaaactatttaagtacaaggtctatggtcgacttaaaaagtggaatgaagaaaataactggaatgttggaattgagctttccgaggtttctactaatccatttcaagacttattttaattagaaagagagttatatatggaatatcctaatttgttacctagatttttaaagtacgttaaagttaattcgcgttctgacgaacattcagatcgctttccatcaactgaaagagaagaaaacttccaaaagaatgttattatgaaagatttggaagaattaggtttaagtgacattcactacaatcaaaatgctggtagtgtaatcgctgaaattccgtcaaatgttgattatgatgttccagtaatgggctttttagctcatagtgatacggcagactttaattcagaaaatgttaaaccacagattcatgaaaattatgatggcgaaagcaaaattcaattaggagattcagagttttatcttgatcctaaagtttttccacatttgaagaattataaaggacaaacaattattacggcctcaggtgataccttacttggtggggatgacaagtgtggtgtgtcagaattaatgacttttgcggaatatttaatgaatcatccagaaattaagcatggtaagattcgattggcctttactcccgatgaagaaattggtactggtgctgaacactttgatgttgaagactttggtgctgactttgcttttactgttgatggtgaagctcctggtaagttagattggggtacattctctgcggcacaatttagtcttgatattcagggagttaatgttcacccagctgttgctaaggggcaaatgattaatgcaattcaagttggaattgactttcataatcaactgccagaacacgatcgcccagaacataccgatggacgcgaaggtttcttccatctaatgaattttgctggtactgttgataatgctcacttagattacattattcgtgattttgaacgtgatgggcttgaagagcggaagaatttggttaagtcaatcgttaagaaaatgaatgatgaattcggtactgaacgaattacacttaaaatgtgggaccaatattacaacatggccgatgaattaaagaaacatatggacatcgttgacttagcgcgcgatgcttataaagcagaaggtcttgaagtcaatgaagacccggttcgtggtggtacagatggctcacaattgacttatatgggcttaccatgtcctaatatttttgccggagaagaaaacatgcatggtcgttatgaatacacagttcttgagtctatgtggaaagctgttgacgtgatgatcaaaatggctgaattaaatgctgaaagagctaagtaagtgaaacatttttgactaaaaatatcaataattctatttctgatctaatatgagattattgatagattaggaaatagggtaaacatagttaataaataaaaattatgcactaatactattaaaaataaaagatagtttataattaccgtcattataggattatagactatctttttgttgtacttttaacttttatgaacttgtgaaacaaagtgattaaacttagcccttgcaaaaagtgactaaagtaagtattatagttagtgtaatagattaataatacagtacaaaataggagctgagtaaatggaatttaaagataatattcctatttatcttcagattgaacaatacttgtatcgtcaaattgctttaggcaagttaacagctggtgagaagattccttctgttagaaaacttgctctagaattaaccgttaatgttaataccgtgcaaagagcactacaacagatgaacagtcaaggtattctttatactaaacgtggcgaaggtaattttgttactgaagatactaaactattatccgaaaccaagcagtcattaattaataatgaattagaacagtttgttcaaaatatggaagagtttggaataggaaagaacgagttagtttcaacgttagagaattatttaaaaaatggtggggatcagaatgaatgatttattagctattaaagatgtaagttataagaaaaatcagaagcaagtattgcaagatgtgaacttgaatttagctcctggcaagattgttgcgttacttggtgaaaatggtgctggtaagaccactttgatgcgaattattgccggtgtagctaagaattacaaaggcgaaattaatttagagggggcaacaaaagagacagaaagaaaggctaagttgtcttttactgatggtttaactggcttcagcgattcaacaaagatcaaggaagtggttaaattttacgcaacgatttttcaagattttgatgagaatgaattcgatgagctgcgtaagtttatgaaattagatcctgaaatgaagttgagtcagttatcacgaggaatgcgtgaaaaattgattattgctttaacatttgctcgtaaagcagatttgtatttacttgatgaaccttttggtgggattgatgcaatggctcgaaagaaaattattaattccatcattttgtggaaagatgaaaaggcaacgattttaatctcagatcactttgtcaatgaaatttcatcattgcttgatgaagtggttattgtaaaagatcataccgttttggaacacaagtcagcagatgacattcgtcaaacgcataagtcaatcgaagaatactatgaaagtttttatgcagatgaggatgatgaataatgactagttttaacacattgtttaatcgaatgtttcaagaaaaaagcaagtcagtctatttaatcttcttaattcaagcctttgctagtttatgttttacaattattggttttgtttcggaaaatggtacaccagaatttgttaatggaaaagatactagttctgtcaatgtgattgttgcttttctcgctgtatttgcagtaatgatgctgataacgtcatttatcgctgattttgtttattggattatttcttcaatcaagaatgaaaaaattaatcgcagtcaaacttggcgcttgattccggtaactgatactaagtttttgcttagcaattttgggacagcatttttaacttatatttggttaggaattttagaagcggtcacgataatcgttacccttttgccgatgttgtctgatcaagatgtgcgcaaagcaataggtcaggctagcatccatctttcagcaagagactggcaaacaatgctcggaagtttgctgctaatcatttttattggctatgcttggtacgcaattgtaagtttgcttaacctagcaagccgcagcattattgattttttgccaggtggctcaagtaaagtatggacctttattattagagtaattgtaattattgcgattatttggattttaggccatgcggcaacaattatcttttcagtcttaggaaagtttagtccttttatggtcaacagccaggatattaactatgccactacgattcttcaattcttggtctttgatgttgtgattactttgatcgatatcttgcttttgaataaattcgtagaagcaaaacagaattaggagttttttatggcaaattttaagaccttgtttaagcaaatgtttgtgcaaaaaaggcgctacgctaacttagttttgttattacaagtttttgcagtcctttttttgctggtaatggctctgttagataaaagcaatttagcttatctcaacattagtaaggacagtaattggctagatcgtttgcttagtgcaggaatgctcgaaacgccgattgccgatgtgatttttgttggtctgctttgctggcaaaatgaaaaaatcaacctcagtcaaacttggcagctagctccagcttcaagtgtcaaaatctggctgattaatatgctttctagtttagttgaatgtatttatatttttgtaattcaagtcattttaggcttcgttgctgctatgattgataatttaagtcatcattattcactgcttcatgacttagttgatgctaaagttacttgggcagatgctagtttattaattgaatttctattgttcttaactggaacggttttagttattatgacttttgtcagttttgctaattttttgacgaaagtaattgttgatcaattgccagttaacaataatattgtcattaagttatttgtgatggcagtgattgtgattattgcaatcttgattgctgaacagctaaacgaacaaattactgctatgtatttgcatcgttttgccaaagaagcagcatatgatccattgggtatttcagtggttgagtactttgcaggagcaattgttttaggagcaatcgacagctacttaatgagtaaatttgtcgaacctaagataattaatcgttaattgaaggggaggggtagatagtgacgaatttttggaccttgtttaggcaaatgtggacgcaaaaaagaaaatttatttatttggttttcttaattaatatctttgctgtagtatttttatcaggttattttcttcttttcaaaaattggaatggtctagcaaatctgccgtctaaaaatttagggcaattctggcgcaataattttgtctatgtgactttatacattgattttgccttttgtgcgattacatgttggcaaaatgaaaaaattaatctgagtcaaacctggcatttagcagctagcgatgaacgaaaaacatacttagctaatatatttagcagtttgctggcatgtggttatttcttcttgctgcaagaaatcgttaatagtctgttgctgatccctagttgcggggcagacagttttgctcaagcatttcgtgagtttggtctgtatccaattaaaacagttcccggcgttgaaataactagcaatcgaatgcttgcttttcattggttgtttatcattttgataattttaatcatttacttctttgtcagctttgccaattttagtttgcgagtaattactgatttcttgccgtttaagagtacagtttgggctcgcttgttaattatcgcaattttggtaattgtcgcagcttactgcggcatgatctttatgtctaagttacagggctttgttgataagagtccaaatttacaagcaaccgatccaatctggttagatgatttatgcttgtttattgttagccttgttttcggtattttgaatctagtattcgtgaagaaatatcttgaaccaaaaatagattaattaatgcaaaaaaagagcttcatttcaatcaagaaatgaagctcttttttgtagttaactaagcatttgctgacatgtaatcataaagctgatttacttcttcggctgtgaattgtccatcgccaactttcatggcgtgaactttttcaactgagaggtgactagcaaaggctaggtcagtgtcattaacatggtgttttacttgaaaattgataattgcatcagataattcttcttgctcattcataataatttctccttaccctctaattttaatcaaattggaataaaaaataaaattttttgcaatttgattaaaatgttttccattgcgtaaatggccaatacctgaagacgactcggccaactaatgcgctgcgcttaacaaaaccgaagtaacgtgaatctttggaaacatcgcggtgatctcccatgacgaagtaactatccttaggtactcgcttttttaaagtgaaattgttagtatagagttcacctaatttatgtgactttctttggtagccattatttaaatatggttctgcaatttgtttgccgttaatgtaaagcttatcatttttagaagtaaccatatcaccaggtgtaccaataattcgcttgatatacagagcacctttttggtctggtgcttttagaatgacgatatcatttcgtttaggcgtaaaatgacgtacagcaatcaaacgatcgccattctcaaatgtgggctgcattgatggaccagatactgtttcatttgataggaaaaaactaaaaataaagtagtaaattcccatcaaaattgcaaacataataattatgtctaaaacaaagcggccaatgctttcatcatcatttctctttttggtttcaaccatagaatatctcctttgcttgctagtcttattataactgaattctccgccgttgaatggtaaaatcatattaaggtgtttaagtatgacaaaatttttgacgaaattaacaaaattagagcaagagataaatcatactgcggttaaacgacaagttgaagaaatagcattaattgatagttatgtacaagcaggtaagccattgaagcgggcaccacgcagattaggtttattgccagatgaatttgaagaagttttagttgaggtgggaccagataaagaaggggccttaagggatttaaataatttacttaataattttcggcaatatctctctttaatatatggcatctggtctctgcctaatattcagactgcgcagttaattaaaaataagctgcatgtacaaacagcgttagaaatcatggcaggcaacgcgtattggtctcaagctttgactcaggttggaattaaagttcacagtacagactcattagagtgggccaagacgtcgaccactggagctaagcctttttatccagtagaagatttaccagctgaccaagcaattaagaagtatcacacagttaatctagttctatgttcgtggtcaccaaatttcggtcacggagatttagaaactgtggcagcttggcataagtataatccaagttgtcatttgctctttgttggtgaaaaagatggtgctactaattcaccagaattttggcaccaaaattggtttaaaaatagtgcagctttagacgagattaatcattccttgcaaagcttcgattttattaatgaacaggtatttgaaataaaaaatgaattttaaaaagatatttttgttactgattcttttattatcttttttaggaattggaacaatgctctccaatattgaatctaattatgctgacgaattgctggaagcacacggcttaactaataatacccgctattttagaacagatagtgatgataagattagtactttcctaaaatatttggacaaaaattatgcgaatcatcaaattcaactgcatctagataataattatgaaaaaaaacaagtgcttgtttgggctaatcatgccgttactggcttgccaactgagagtggtcgctatttttcgcctgatgattttaaaggacaggtttcttttgtggtgctggggccaacagttaaacttaatttattagatgtgcagaataataaatatgttattttaggcaaaaattattattctgttataggcgaatttaaggactatccacaggtagaaatggataaatattatctaagtacaggaattgatcagccaactgctaaagaccagctcaagaattatcgaattgtagtagatgcaacacctgcagtgattgaaaagattgctaagcattatcatgctagtttgcatattccgtcttttgttcaagagcatcatcgagatcgtttatctgtcgtgccggatattttaatgttagttgtttgcctattggtcggaatgatcacaaatatgttgcttgcaataggaattaagcgtcaggctcgtttaacacgtctacacgatgatttgctgcgcaattgggtaattaaccgcagcgtacgtttatttttaatagaggctatttttgcccttgctacatacttctttttaagatggcatgccttttattcaacatatggttctttaatagttacattaatagcttcctgggttgtaattgtattggcgttttgtgggatggtctattacttagtgagaaaggacaggaaaattgctaaatctaccaaatgaatttaaaactaaatatgaaaaattattaggtaccaaaaaagcacaagaactatttgcggcgatgaatgaagagagcaaaaaagcttttagaattaatacattgaagcctactaaggtttcatatgagcttactgattcagtaccgcaaataaattcagcctattatggtgaagtatcgggggaagatcctgagtgggtaagcggtagtgtttattctcaagatccagcggctatgtttcctgcggcaattagtggtgttcggccaggagagcgcgtgctagatctgtgtgctgcgcctggaggaaaaataacagcattaggagaacaattgaagggtgagggccttttagtagctaatgaaatctctgcaacacgagtaaaggcactacgggaaaatattgaacgttggggcatcagtaatgccttaattactaatgaaagtccagaaaagttagttccaattttttcggaattttttgatgtgattttagtcgatgctccatgtagtggtgaaggaatgtttagaaaaaatccggaggcaattgattattggtctcaagactatgttttaacatgccagaaccgtcaaaaagagatcctcaatgaagctgttaagatgcttcaacctggcggacgcttaatttattcaacttgtacctttgcaccagaagaggatgagcagattgttagctggttaaataaagaatatggttttacaattttagatacagggatacaaactaataagattgatgttggacagcctgagtgggctgatgggaatcctgatttgactaaaacattacgcttttggcctcaagatggtataggtgaaggacaatttgtggcagttttacaaaaagtaggtaaagctagaattgaaaaaaagagcaaaaacaaaaaagccaagcgtgatccgtggcgcttaaccaaaaatgatcaggaactagttggtcaggtaatggatcagtttaatttaccagttgctttaagtgactggcgtaataaagcaaaagtccgtaatgaacatgtctatattcctgcaatcagtttgcctgaaaaaagtaagcttcatgtaattaataatggagtcgagttgggtatattaaagaaaaaacgttttgaaccaggacatcaattggcagaagtgctaggtaaggtaaagcaagaacgggtttatgatttaccgacaattgaagaataccaaaattatttgcacggtgaaaccgttaaagtggacagtgatttgcggggctttgtgttagtcagctatcaaaaattaatatttagttttggcaaaatcgctggtaatcaagtattgaagaacttttacccaaagggattgagaaaatgataaaactaattgcgacagatatggacggaacctggttaactgaccagaaagactatgataaagaattatttttgcgtgaatttgcggaaatgcaaaagcaggggattaaatttgtagttgctagtggcaatcaatatgctaacttaatgactcgttttcctgaggttttggataaaatttattttgtagctgaaaatggggcattagttgctcaaggaagacaaattttgcatgttgactcgttaagtgatgacatatatcaaactttattaaaaataactactgaatatccatatccagctgtagtgatggggctagtaagtgcttatgttaaaaagagcagtggacgagcttataaacaagaaatgaaaaaatacatggagcatattactgtagtagattcttttggagaaattgatgatcagattttcaaggtcagtctgacagtgccagaagataaaatgtctaaaattttgcgcgaattaaaagaaaaatatccggaggttggttttgtttctggtgcagcagactcgattgatatgcaaactaagggaatgaataaggcagtaggtctagcatatttgagtcaaaaattagggatcaaatcaagtgagatgatagcttttggcgatagcggtaatgatgtaggaatgctgaaatatgtaggccgtagttttgctactgcaacggcgttgccagaagccaaacaagctgcagggcaaattattggttcaagtaatgaaagtgctgttcaaaaagaaattgctaaattgcttgaaattaaataaggaaaattatgtaaagtaaaagcactagtaatcattaactagtgcttttactttacagtaactgatcgatttgagcctttaatggtaaattatagtatttttttatttgtaccagggatgctaaatcttttttgccgtaaacagcaattaaagcagccaattcatttttccaattagtaattaattgctctaatccagtactaccattttggatgtattcttgtaaaaaaacatttgaaataccaacaaattttcctcctagagctaaaccttttaaaatatctaggggattacgtactccaccagaaacataaaatttaacttgctcttgccatgccatcagagcagtcaccacagtaggtaaacctaaatcttctaagtatgaaacgtcactggcattacgtgcattctcaatctgggcaaagtttgtgccacccgaaccggcgacatcgaagtattcaatgccatttacttttaaaagatgaatacttgtttgatccaatccaaaaccgacttctttaataataatgggcaaatcgatagcggtacgaattgctttaattgaatcaagccaacgaaagtcacgatcaccttcaggcatggcaatttcttgtattgtatttaaatggatctgaagcgcatctgcatttaattcttggataatttgtttaattgcagagattggtgtttctggattaacattaacaattagtacaccatctggatcttctgctctggcaaccataaaactgtctagttgatcagtttccttagctaaaatgctggcagatcccaaagctagggcaatattttgctgctgggcaacctgtcccaatgcttgattaatttgtttagaagcagctgagccaccagtcatagcattgataaaaaaaggcgcagaaacatttttgccaaacatttctgatcccagaatagttggatcgacttttgtttcaggcagagcagggcgcaacaaatgcagttgatcaaaactattatatttttctttattaaaaaacatctgagctaacttcagatgttcttcttttctttcagatctaatcgacatagaactctccatcaatgagccatgataatctggtgaaccttaaaattaagaggcataattccattatggcgccattcgctttcaagtgcttcaacatcggtattagcatctgtaatcacaatgccacagtcaccattaccagcaccagaagttttagcagctccaccaaaattttctgcaattttgattaattgcgataaacgtggaatttcaatggcaatttggttaattttggcaaagtgctgcaacaatttacggttagcccgaatttgttgtttgattaaagcaatattgtttgcttcgaaaccttgaaccatctttaaaacacaagctctagaagctgctaagaaatttttatattccatattcaaagccgccttattagcgttagtttcatcaacgaggcgtgaagttgatgctggcttttgactccaaccaatcatcagtttcatatctttaggaggagttagtaattcaacttttaagccaggccaagcttcattaacgacttgaactaaagtcttattagctaattcttgctttaaccattttttgtcaaaagtttggtaagctaaccagccgccatagacactagctgcaatgtcaccagctgagccatttccttgaactgaatagtgtgaaatagccgataatttataaaccagttcattgctcatttttacgccataaaaacgcaagatagctttaactgtagctactgtgacggctgcacttgaacctaaaccatattttttaccatctgcagaatctaagtctgaattgacgtgtaaatcatagactttcatcttgatattttgctcaatacaatattgttcagtaaatgaaatagctgacaaaatatattcaaaagggttgtcacgattatcgattaccatttttgagccctgacgaacccaatgaatcgaatcctgtgagtattgcttggagtgaattaagccagttgcccctttactcttagtgattgacacacgtacaaattggttaactgctactaaaatagcaggacaatcttgctctaatactgcatattctccggcaatatataactttccgggcgctttttctgttatcaaaagaactaaatcctcgaatctaattaacttttttaattacaactagtccaaataagtaattccaggaccaaaacttgcattcactatattaacattattaaattcggacgaaaagcgttgaatgatatctttgctatttcttaattggcaaagtaccttaatatttggtcctgcatcaattgtatagtaacattcaattccttcagtacgaagttgttcaactaatttaatagcttgaatggtttgcggctcaaagtaagtgaattcaggctgtgcagttaaattaattgcatgcatttcatttgcatttaactcagctaactggcctagggcagtgaaatcattactttttatagctttgatcatttcatttaattctgaattgttgcgttcaagccagggcctgaaaaatggagaagattgggcatctttcataccataagtcgaagaaatctttttttgtttggtatttaattcaactgctaaaaggtgaagatccatcgttggtgtttcatctagtgcatatgcgtaagatgtttcgtcgctattacctttttgccaaacagcaaaaccgccataaacggagcggctggcagaaccagatccaatcctggctaaacgagataaatcttctagatcaatgttgatgtcatagcattgacaaaaagcagcagctagtgccgcaaaagcagaactagatgatgctaatcctgcagaagtagggacgtgattgacagatttaacgattaaattgccagtgacgtgaaaacgagcctgcaatttttttagataagcaaaaacacgttgactagctgcagcagtttgctgttgattatttaagaaaaattgattttcaccatctgttttttcaacgctagtatcagtataaaaagcatctaaagtcattgataaactagacattaaaggaagacgtaatttgtcgtcagctttgccccagtacttgattaaagcaatgtttgtatgtgctcgtgcggttctattcattaaatctcctcaatccagtagtcactaattaaatctttacatttagaggcaatttcttgggcgacagtttcgttatcgcacaaggaaatagtaatgccgccaagacctccgcctgataatttaaagcctaaagcgttatttgacaaggcaattttttgcagttggtcaattttatttgttgaaagatcaaatgagtgcaaaatttcttgtgcttcattaaaaatctgtccaactgcttgacgatcgtgcttgatccaagcttttttagtaagatccgctaattcacccaagcgagctatttttttcttggcatagtcggacttttcaagcatttttttaactaaaaaaacagcttcctttgtattgcctagttgaccagtatccatgattaacagggtagctcctaatttggtttgtaatattttaggccccatttttttattaaaaaaaactagataatctgaattaacagtggctgcatcaagaccagaagctttaccatgattgatcatttcagcatgattagttacagtcataatttctttttcagtcatattcagctgaaagaattggttcattgccctagtggtacctaatgcaacagtagcacttgaaccaaaaccacgttccattggaatttcaccagtgtatgtaattttaagtggatggttattgccagccttttttttcatatgtttaactacgtattttaggccatcatattctgccggtgcttcaaataatggaccgtggtagcgagcggtatccatccacatttgagaagcagattcaacagtagttttaatgtgtaaagccttaattggcatagctaaagcatcatatccataaactactgaatgctccccaataataattaccttgccatgagctaaatagctgcttttcatttttaatcatccttaaactagatttatacaaaagattgcccttgctatgataaaataaaaagcaaggagtgcgaacaaatgatcaaaattcttacaggacgacaaaccgacccattacaagaaaaaattctggaagaagcagttgaaaactatcagcaacacccagaacaagaaacttttatcatcgttcctaatcatattaagtttaccacagaagttagggcaattaacaaattagcaacaagcaaacaacaaactgagactgcagttaaaaatttgcatgttttgtctttttcgcgtttagcttggtttttcttaaaagatgccgagcaaggattgcctaatcaactagatgatgcagctagtgcaatgctcttagctcatattattgagaacaaaaaagatgaattgactatttttgaaaatgttaatgttaattctggattagtaaatcagctttatcagacaattttgcaagtctatgacggaaatttagatttagacgagatatcagaggataatttagatcaagaaactaaaaataaattacatgatttgcggattatctatgatgcctttattaaagaaattgcgggtaaattctctactaagaatgaggttcagctgcaactaaatgaaattttagctaaaagtaaaaatttaaagcaagccagtttttatttctgtgatttttcacatttttcattacaggaaacactaacgattaaaattttgatgcgtaaagcaaaagatgtaatccttgcatttaaaacgcgcttaggtgaaattaattctagtgcggaagaaggagattatgattatgtaatccagcaaactattaagcgcttaacgctgttcttacaagagagaaagatggactacgtgacagcaacttttccgcttaattcgcaatcaaatggtcgtgaaatattaaatagtctttggacggagacaattcctaaagttgacgaattgaagcaggtacaattagttaaagcagactctcgatatgcagaggcttattttgtagcgcggactatttatcaacaggtagcactaagcaactatcgctatcatgattttttgattttagctccaaatttaaaggaatacgagacttatttgacgccaattttacgtcaaaatcagattccattttttaatgatttacaacaggaaatgaagtatcatcctctggttgttttaattgaaagcttatttaacttacatgagaatccgtttcaaacacaaaatatgctagccatcctaaagacacacttgttaataccttcttggtataaggaagaggcggagtatattcatgatgttgatgaactagagaattttgttctggctcatggtattaatcataatttatggaaaaaacactttgataattttgtgaatgctgaagtgatccgcttagacaaaatggatgatgaagtagctaagatcgatcgtttgcgcagctacttggttgataagatttcaacatttttcaaaataatagagcaagaaaaagatagtcaaaaggcgttaacgatattttttgagttcttaactaagaacggaattgccgaccgattagaaaaatggcgtgatgaggccaatgaagccggtgatttacagcaggcgcagcaaccagagcaattatgggatttattaatgcagctgttgcaagactatttagcaattaatcctgaaacttttgatttaaatgaattctttaatatgttaattagcgctttccgagaagcaaatttttcccaaattccttcaacacttgatgcggtaaacctttctgaaatggggatggtacaaactagcggctataagcaagtgtttatcattggcgctactgctaataatttaccccaaattcagaaaatgccaggttttttaactactgaaaacttgaatcagctacaaaatagttttaattcagaatcttacttagaagatagtcaacagcttaataacttagaccaaaattatcagtttggtttgtcgctagctttagcacaagatagggtatatgtatcttatccagtacttaatgcttcaaatgaagagcttgatccttcaatttattatcaacgtttaaaggattatggtgctcagcaatttgttcaacatgatttgccagaaaagatgcaggatcttttgtctttcattactaaccctgatgcaagtttaggctatttaacctatatgaattcaataaattcaggtcttgctgtgcaagagttattaaaaatcacacaggagcaactacctcaaaaaacgaagacagtgcttgaagcaagtgattttgataaccagccagaaaatattggtcaggacttggctagtcaattgtatggtcaaaacttgaattcatctgtgtcacaactggaaactttttatgaaaattcatatgaatatttcttgaattatgggcttaagctgcggcgacggtttgaaaatgaatttgatgttattcaggctggaaactattttcacgagacttttgaccgtttagtgaaaaaaataaacaagcagcataccgacttagcagatttaagcagcatagaactggaacaaatgcttaattcggtgcgaaatgtgatgaaggatgaaggaaaatattctcaattaatgaatgatccttttaatcaatatcttttcaagtgtctagaccatactacttctaaggtagctcataattggcggcgctccttgaaggaaaccccgttacgggctaagtattctgaattaagttttgggttaggtgaaaaaatcaaaggattaagcttaaaagtgccagatatatcaggtcaacataaagttgatttgcgcggtaaaatggaccgggttgatttggccaatttcaatgataaggatcaagttttagcccaggttattgattacaagtcatcagctaaaaaatttgatcttgggatgttttataacggaattgctttacagatggtttcttatttggatgttttgactaaaaatgatcaattttttgctggaaaagatcgtctttcattattgggtgctttttatcaaactgttactagacaattagaacgtttgaatagcaataaactaattgatagtagtttaaatttgaaaaagggagcaactgatagtaagcccaagctgatgtatactggcttaatcagcaatgatccagaaatcttagtagaagctgagccattacttgatgatcatcctagctattcttctgaactgtatactggggttaaaactaaggctagaggtggctttagcttgccacgtgaccgcaactttagtgaggaagaaattgaattactgctagaatacgatgagtatcttattcgacaagcatcaagccaaattttatctggaaaaattgaacttaatccatatcgttatggcaaagcgaagaatgccttaacttattctgattatcgtgatgtcttcttttttgatgcgatgctgcgtcaaaatcaatatcatgaaataaacaatctgaataaaaaagaattaattcttaaaatcaaagagaaattaggaaaggaacaataaaattgtctcaatttactaaagagcaacaacaagcaattgatgatcgtggtcatgatattctggtttctgcttctgcgggtagtggtaagacaactgttcttgttgagcgcgttttaagggagattctttcgggaacccaagttgatgaattattagtaattacatttaccaaagcagcagctgaagaaatgaaaactagaattaaacaggcattatcagctgaattagcaaagccgggatctaatcgcagatatttacgtgagcagctaaatcaagtggatactgctaatatttctacaattgatgcattttgtctagaagtaatccatcgcttttattactctgtaaacttagatccaagttttagtattctaactgatgatactcaagctgcattgttaaaagaacgtgcattacgtgaaattgaaggggagtttctagaaaagaaagacgtaaattttaggcatttttatgataactttgcaggggatagagatgcggatagtccgcgcgacttgttgctggatttgtatgattttgccatggccaaacctgagtatcgctcatggttaaaaaaattggttgatgtttacgtggttaatggcagtatcgtggaatctgatttgtggcaaaaacagattaagccatacttgcttactagtattggcgacttacaagggaaaattaatgattatttagaaaatccagtaatagaaacaaaagagctagctaaggctaaggaagcttttaccttgtttgcacaaaatttagatcattttgtttttgctttagaaaatgatgcagactacgataaacaacgaaaactattacgttcgtgtgtttttacagcgaattatcgtaagtcaagtaaatgggatgaagatgttctaaatttttatgaagacctacaaaagttaaaagatgaagcaaaaaatttggtttttgatacttttacttcattttttgctgttgatgaacaagaacaaattaaagtcatgcagcgcggccaaaagattgttgctgcaattgctaaatccgagctagccttgattgatcggtttaataagctgaagcgcagtgaaaatttgcttgactatagtgatatggaacaattggcttatcagattttgagtcaagatacatcgaattctcaaatggctcgtgaattttatcaaaataaattcaaagagattttgattgatgaatatcaggatattaatgctttgcaagaaaatatcatccagcaaatcaaaaataaagataaaaatacgcttttcatggttggtgatgtaaagcagtcgatctatggctttagacaagcagagccaagcttatttttgaaaaaataccatgattttgccaatgatgataataaacaaaccaaaagaattctgttgtcagataatttccgctctactgagccggttaccaaaattgtaaatcaagtatttaaaagtgtgctaagttcagattttggcgggattgactatcaaaaagaaggacaattaatttttggtgctaagtattatcctgaaaacactcctaaagctagtgaagtaattgttcatgaaaagaaaaatagcagtaatgaagatgaaaatgagatagatttttctgaaattcaaatggttttagcacgtattaagcaactaaaagaagagcgtgtacaaatctttgatagtaaaacaggaatgagagagttacgttacagtgatattgctatcttgactagaagtcgtagtgataatttggaaataatgcaggaatttgctaagcaggatataccattatttgtaactgatgcgaagaattattttcaaacttttgaattgactgttatgatgaactacttaaagatcattgataatcccgatcaggatattccattagtttcagttttacgttcgcctttgtttaattttggtgaaaaggatttagctaaaattcgtatcaagagtaagaactctactttctatagtgcattgacttcttatgtaggtgtaggagatgaattaagtactcgaatcaaagattttttaaatcaactagctgatttgcgcaagtttgccacggcacatcgtatttctgaattgatttggagcatttatgctaggacaaatttattagagataatgaccgcactacctaatggtgaacagcgacgagttaatctagaagctttatatgaacgtgctgcttcatatgagagtgcagggttcaagggattataccaatttatcaattttattaatcggatgcggcaaagtcagaaggacttggcacagcctttattaactaaagaagctggtaatgcggtcagattaatgactattcatggttctaagggactagaatttccgatcgtgttttatgtggggatgcagcataaatatcaaatgcgtgatttaaaaggtaactatgtgattagctcagatagtataggaattacgctccgtgaagaacattatcggattgactctttagttaaagcgatgggaaatgtaactaaaaaaaggcaattattagaagaagaagcgcgaattctttatgtagcattaacgcgggctaagcagaaattaattttggttggcgatgttcctaatctggataaacgagttaaagaatggtcgactgaactaaatcagattggtcaattatcattagcagataagttatcttccactagtccattgagttttatgggacctgcgttggctttagatcgacacctagctgtgaaaatgtctgatattactaattcgttggataagagtcagtcgtttttatatattaattatgaaaatgctaacggtgaactacctgattatcagaaagcggagacaagtaatgataaaacgcaaagtaaccttttaaatcaaaccactaaacggctttatcaatttaattatccgtttaaagatgctagtgaaactacagcttaccaagcggtatctgaaataaaaaaagcattcaacgatccgatcgagaccgaattagagaatgcccacttattgacatcgactaatcgttatttacaaccgattgatactaaacctaatttcttgtatcaaactaagtttactggtgcagaaatcggaactgctacacacatgattttgcagtattatgattatcaaggcaatggtgctgaagatcaactagaagtagaaattcaagaattgattaagcaaaagaaactgaatccagaaattgtttctagtttaaagaaagaccaaattgagtggtttgttcatagcaattttgccgaggaattttggcaaaagccagagaatttaaagcgagaaatagatttttctagtttaatctccgctaaaactttgtttaaaaacttttcagatcctaatgccaaaattttggttcatggtacaattgatggctattttgtcaaaaatgatggtattattttgtttgactacaaaactgaccacgttgatcaatcgcatttatctgaatcaattgaattgattaaagaaaaatatacaggtcagcttagactatatgaacaagctatcaatgaatttagtcaaaaaaaagttattggaaaatatttaattctgcttgatgctaaacaagcggttgaagtgaaatagaggaaggaggaaattatggcaaaaagttttactaaagatacatttgctgtagttgatctagagactacaggaacgcaacgtgagaatgggcatcatattattcagtttgggtgtgctattattaaaaatctcaaggtagttaaaacttattcatttttgatcaatccgcatcgtgaaataccacaatcagttgttaatttaaccggaattcatgatcaagatgtagcaaaacaaagagattttgattattatgcacccaaaattactaaaattttgcaaaatactgttttcgtagctcataatgttgactttgatttgccttttttgaattatgaactagtgcaacatggttatgaggcacttacaaataaagcaattgatactgtagaactggctaagattgcttttccgacttttccatcttataagttgagtgatttgacaacacaattggggattaaacatttagatccacataaggcagattctgatgcttatgggactgcagttttattgcttgaaatttttaataaattagaaagtctacctcaagctacactgaataccctcagttcattatctcatgggcttattcgggatacatcttgggtgattacaacgattgcagataatttacgtcaagaaaaacggcctttaggtaaagaatatatgcaagtgcgtaatattattctgcaaaaacaaaatgataattctgaagcacatggtgggaatgctaaattcccaaagactgactcagagaaacaaaagctatttaaaggtcatttacactttcgtagagctcaagtcgacctaattaatcatttgcatcagtttattaatgatccagataaaagggcgatgctaattgaagcacctaacgggactggaaaaactttttcttatctttttgcttatgcttatcagctttattctggtagaaaattagttgtagctacaccaactaaagtgttgcaagaacaagtgattgaacatgaaattccgcagttatttaaggtgactaagttggatttgactgcagaagtagttaagtcaagtagtcgttaccttgaccttgacggatttgtacagacgatttttcaaggtacaccgaataagcaaaccttgatattacagatgcagatactggtttggctgactaagactaaaactggtgatttagatgaattaaatttaactaactataatgcaccactctttgcacagattcaacatccaggggatgcaagagtaggtagccgttttgcaggggtcgatttttggaatttagcgcgtaaacgacaagaagaagcggatatattgttgactaatcatgcttatttggctaaccactatatggatacaatttggggtcagaatccgtatttagtcattgatgaagctcatcgtttcacagacaatgtcgtaagttcgcgtaatgattctttgcgttttgaagctttgtggggagttttaagtcatctccgtaatttgctttatttctcagatgaaagtgttgaagcgcaatttaatgatgatgtgcagctgaaccttttactaaagaaaatagatcctaaaattttggaattaattcagttaattaatgaattacaaaagcaactttattttcaaagagataatgctgttaatcggacagttttagctaatggtaatctagaacttagttttcaaggaaaaagtttatttggcggaaatagcaagtttaaagcgattttacctaagttccaacaaaaattagaagaggttagggacttaactaatcaggttttatttgaattatataatgaacaagaacgcatgctggctaatgttgaggtattagtcaatgagattacggaacaaattgatcgcctagattattactctgaaaagggctatcaattggctgatttgctttctgatcaaaaaggtttagagcaagatggctttattttgatgattactaatcctgatgatccactaagtaccaatttagactggttaatgcttgatgctggtgaagtattaaaacaaatctatagtcgttttgaccatattgccttcgtcagtgctactttaaccagtaatcgaaattttgaatatgcaatcaaccagttagctttaacagaattacatccgattgaatatattggtaaaagtacttttaatataaaaaagcatttacaggtactggcagttaataatatgcctagccctgatagtgaagaatttgaaaagactattgcacaaattttacttagtgacattcaagataagcaccatgtacttgttttgatgactaatttagaaaaaattaaaactgtttttaccatgattatgaatgagccacagctaaaagattttgaaatcttagcccagggattgtctggttccaataaccgaattgctaagaggtttgtaattgctaaaaagtcaattataattggtgctgatagtttttgggagggaattgattttcatgattgtgggattgatactgtttttgcggcaaaaatcccgtttgaatctcctgatcaacctgaagttcgtttaaggcagaagaaattggaagatcagggaatcgattcttttactaaagatagtttaccaagagctgtcattcgttttagacaaggaatgggccgtttaattagaggagaacaggatcatggtcaatttgtaattttagacccaagattatggactaaagattatggtcaagagttccttcaaacgattcctgtcaaagttgaaaaggttactagagaagaattaaaaaagaaattagaaaataaataattatgttacaagatgatacaagacaaacaatcaagtttgtgagttgggtaattggtttgataatagttgcctttctagccagcattgctatcttttattatgctggatctagaagtcggggcaatgatcaaaaagttacgcaattggctactagtaaaacaccaattagaaagattcaaaactattatcatttagatcgtggcactagcagctatgctatagcaggcaccaataataagggaaaacaatattactttatttatttgccaaattctaaaacggcatatctatatcctgcggccaaaggaatcactgaatctaagattaaaaataagtttaaatctatccatacggatgctacaataaataatattaatcttggttggtataagggtgaggccgtttggaaagtggcctacaaaaaacaaaacggcaatctaggttatactttatatgaattcaaaaatggaaatgatatctcagaagtcgataatttatagaaactttggtattatggaaactgtataattgatgaaaaggtggataggattttatgacagaattgatttcaattaaagattcttctaaacatgttgatgaagaagtcaagatgcatgtttggttaacagataaacgatcaagcggaaagattatctttttgcaattacgtgatggtactgcatttttccaaggggtagtacgtaagaatgatgtatcagaagaagtatttgatactgctaagtcacttagacaagaagcaagtttttacattactggtactgttcatgaagacgcacgttcacactttggttatgaaattcaaatcactgatttaaaagtggtttcaaacaatgaaggttacccaattggtaataaggaacatggtgttgactttttacttgatcaccgccacttatggttaagatcaaagaaaccatttgctattatgcaaattagaaataccatgtttaaggctactgtagatttctttgaaaaagaaggctttatcaaatttgatgcacctatctttatgcattcagctccagaaggtactactcaattattccatgtagaatactttgaccacgatgcatatctttcacaatcaggtcaattgtatggtgaagccggtgctatggcttatggtaagatctttacttttggtccaacttttagagcagaagaatcaaagggtcgtcgtcacatgactgaattctggatgatggaaccagaaatggcttggatgcatcaagatgaatcgttagatattcaagaaagatatcttgcctacatggtgaagcaagttctagaaaataatgaatatgaacttaagattcttggtagagatcctgaaaaacttcgcccaactactgaaggtaacttcgttcgtcttccatacgatgatgcaattaaaatgcttcaagatgctggacgtgatattaagtggggcgatgactttggtgctccagatgaaggctatatttcagaacaatatgatcgtccagtcttcattgtcaactatccaacctcaattaagccattctatatgaagaagaatcctgataatcctaaggaatacttatgtgctgatgtaattgcaccagaaggttatggtgaaatttttggtggctcagaacgtgaaggaaattacgaaatccttaagcaacaaattcttgacgctggtttgaatttggaagactaccaatggtaccttgacttacgtaaatttggtggagttcctcactcaggtttcggtatgggctttgaacgtactattgcttgggtttgtcaccttgaccacattcgtgaagcaattccattcccaagattgattaacagaatgcaaccttaatttggttaataattaaatattgatacacaaagttggactagttattagttcaacttttgtttttgaaaggaaattattttggaatttaatgattatcgggcattaggctttacaaccttacaaaatggattgatcgcttactaccctcaattaggcattagtgatgctgaactaattttgataatccaattggaagcatttagccaacgaggtgagagttttccatctaatgaaaagattgctgctaatactaatttatcggttagtgatgtgggtaatcttattcagcggctaattgaacgaaattatttaactattgaacaaatgactgatagtcaggataaaattggtaataaatatagtctcaataagttgtataatgcacttgatcactatattgatcaaaacgtcttgatcaaagataagaaaaaagataaaactgtttcagttgctaataatttagaaaataatccgttaaattatttatcacgaaaagtagaagttgaatttggtcgctatctgagtccaattgaacgagaagagattgcgcaatggttaagtgtggatcactatgctcctgaattaattgaacttgctttgcgagaggctgtattgtctcaggcatattctttaaagtatattgatcgtgttttacttaattggcaaaggcatagtctgaaaacaactgatgaagttgagagatttttgaaaaggaatcgataaaaatgacagaagatttattgagtgatgaagaagcacgtaaagttttgaaaaaaattttagcattgtatcctgacgcacaaggtgaattgcaatgggatactaactttcatttactttgtgcggttatgttgagcgcacaaacgactgataagatggttaatcgtgttatgcctagttttagtaaaatgttcccaaccccagaagtattagcaaaagctccaattgaagagattgagcatgagataaaaactattggtctatttcgttcaaaagctaaacatttaaaggccactgcgcaaattttggtcgataaatataatggacaggttcctaaggataaaaagttattgatgaccttaccaggggtgggagagaaaactgctaacgttgttttggctgaaggctatggtgtgccagctattgctgttgatactcatgtgtcacggatttctaaaaagttccatattgtagatgacaaagctactccacatgaagtagagaagcgattagaagcaattttacctaaaagtgaatggataaaaacgcaccatgcgatgattctatttggtcgttatacaatgccagctcgagctaaaggcgatccgtattcttatttaaattccgaaaagtaaagccgaaataaattcggctttttttattgaataattttatataatctgttgttactaaattttaattttataatttcaggcctcaactacgtttcggccaaaataaaaacaaataacaaaacgctatctgttaataaatatatttaattattgcctagtcattatccgaatcatcattacgttcatgtgattcttcctcaggttttctcgttgatgaactttgttgtgttgaagaagattgtgtttttctttgagaggaagaggctcgctgactgctattggattgagatgatgagccattttcacgacttgatgatgattgagtaactgcagttctagaagatgaaggagtagttccagtattatcgcttgaagtatcagtttcttcatcgtcttcatcataacttgctgcactattaccaattccggctggggcatggcctcgaacaaataattgccaagtgccgccactagttgctaattctggaggattagagttatttacaattttcgctcttacaactgagctaggctgtttccagtctaggttaggtttattgttcattaggtaggtcatcatactcttatacattagctgtgcagattgttgacctattccagagatagtaccgtcctttaaattatcgtaaccagtccaaacacccataacatatgatctggtataaccaacgaaccatgaatcttttggagttgaattatagcttgggtacttagctagatcttcatcagagtatttaacagtaccggttttaccagcttgataaagatctgcaatttttgcattagtaccagagcctcgtttgattacgcctttaagcatatcggtaatcatataggcagttgatttcttcattacacgtacaccatttgaatcataatttctagttaatccatctggtgtttcaatcttagaaacaaattgcggcttgtggtatacgcccatggtggcaaaagcactataagcaccagtcatttgtaaactagacgcattagcgccaattgcaactgataagccggattttgatgaaacgttaacgcccattcggcgagcaaaagctgaagcccgttttactccaacttcagcaagagttttaacagctggaacattacgtgactgctccaatgcatgtcgcatagtcatcatcccgtcgtatttgttgtcccagtcatataattggatattggtaccaggataaacatacttactgtcatcaatcatttttgctgttgaccaattcaagtattgaatagcaggtgcatagtcaagtactggcttaattgacgaaccggtagagcgtccagtttgaacagcccggtctaatcctaattgaacagaaggtaagtgacgtccacctaagattgcaacaacatgaccattgtttggatcaactacagttgcaccaatttgcattttattgtttgtaaaaggtacagaaccgttgttagctaactcgtacagcttgttttgagctttttgatcgatattaatagtaatctttaaattatcgtgatatggatcaaagcctttgctcttaacttcagaaattacctctttaatgtatggatcatcaatttttctaatcttagactcgttattatttcgatgtgatttaagtcccttactaattggttcagcaactgcttgattgtactcagctttagtaattttgtcattttgtagcatagtctttaaaacaatatcacgccggtatttggccttttgcggataaagatatggatcatatgcaacaggtgcattcggcatccctgcaatcaatgcagtttgtgccaaatctaacttacttagtggcttaccatagtagtagttagaagcagtacccatgccataatttccatagttcataaagactttattaatataaaattctaagatttggtctttactgaattcatgttggactttcatagctaaccaagcttcttgagcttttctcttcagagtacgttgagaagcagcagtagagaagaccgttagcttaactaactgctgggttatagtagaaccacctgcagcaatactattacttttggcattagttaacatagaaccaataattctaattgggtcaacgcctaacttatctttgtaaaaacgtttgtcttctactgaaactacagcatcttttaattgctgaggaatgtctttatttttaacataaattcttttttcagaaccaagtgatagtaaaaacttaccattattagtatatagacttgaagatttaccactctgcaattggtcctgactaatgttaggagcatctttggcataaaaagcaaaaagcccgattccagagattactattaaaaatatcagcaaaaagatccatttaatgattctaatccataagtggccactacttggccttcgaccatgatagtctcttcgtgattctcgtttcatattattgttattatctgccatgattatcttttcctatctgcaatgaatttatctaccgccttaagataaggcagtgtaggacgaaagccacttttgatttcaaaagaattgttttcaatttcttttaaagtcattgagcttttatctttttttcgccaagctcgaattacaaaactagctggagtaacaaagtagcgctctaagctagcgaacctaataattgtaaaacaaattccttgttgttttaagcattcgtccaagtgaaaaatttggtgttcatgaaagttttttaatgggaagttagttttattccgtgtttcttttgcctcaaaatcgagatagtatcctttataaacaccattatagtcagttgttgaagcttgcctaaagtaagcttcacgaatgaccgccttagaacgtttgggataatcaactttaacaatttgaattggggttggctttttatgaacaactgcaatttcttccattaaataatatttattagattcattgatttgttgctcaagtgtcatcccacgatcagaaaagttaacaccttttttatgatgatatgatcggtgaactggatgttcatcttttttagttacaggttttctaaatgcggctaaactaccgctaggatatttgaccattgtcctcactcctgttagcattatagcaataaagactacatttttgaacataaaggggggcttaaacaaatgcagcgtttatgggtgactggctatcgcagctatgaattaaatgtttttggcgatcgtgatcccaagataactgtcattaaatatgccctaaaaaattatctgacaagtctactggatgatgggcaattggactggattattactggagctaacctcggtgtcgaacagtggacagctgaggttggacttgaattaggagaaaaatatccggtaagaacatcaataatgattccatatgaagaatttgctaatcgatggaatgatagtaacaaagctaaattcttaaatttgaaggaaaaagtggacttttttgcttcaacttctaataccccttatcaaagtccacttcaattacgtaattatcaaaattttatgattcagcatactgatcgagcattgatgatctatgattcagagcacccaggtaaacctaaatatgattataatttaatccaaaaataccaggaaactaaagaatatccattagatttaattgatttttatgatttacaagatgcagctgaagaataccaagaaaatcatcaaataaatcatttttctgaataatatggtaaaaattttattaaagtctgtttctttattttcagtcagcgttgtttttgctaaaatagggtggaatgtaaaggagttgtcagtaagatggcaaatttaaatgatataaaattatcaggacaagatatattaaagaaacaattcaaaagtaaagtaaagggatatgatcccgatgaagttgatgcatacttagatgaagtaatttctgattatactacttttcaacaaattatcgaagatttgtatggtcagatcggtacgctccaacgtcaattaatggatgaaaagcaaaaagcaaagaaaacagttgaggctgaagaagaaaaggttaagacttatatgccaacgcatagaagaagtgcgcctgtgaagtttgcagaagatgcagatgatactcaaggtgaaatttcgactaatatggctattattcaacggatttcaactttggaaagaaaagtttataatctagaacaacacgtttatggattaaagcattaatttttgctataatgactaacagtgtgaattttgagtaggcgcggctagcttatgttagctgaggaaagtccacgcacacacagactgcgatgtttgtagtgatcgtattcagcctaacaagctggaggaggacgttagtcttcacggcggaaaaagtgctaaatcttcggacatgcattactatcctgaaaagtgccacagtgacgaagcaaggtcagaaatgactttggtggaacgaggtaaaccctgcgagtgtgaaacccaaatttggtgggggagtttcggcctaaggaaatgaactaaaggtcggattattgctttaagcagtaaagatagatgactactgaaggtaatctttgccagagattattggaacaaaacgtggcttatagaaattcacacaggcagagttgggcttttaggtccagctcttttttattttgaaaatgaaagagtaacaatgaaagaataccaactttacgcaactatgggcgctggttttgaaagtgtcgttaataaagaattacagtctatggggtataagacccgtgttgaaaatggtcgtgtcttttttaagggtggtcaagaagatatagttagaactaatctttggctgagaacagctgaccgaattaaaattttgctaaaagagtttagagcaacagattttgataccttatttaatgagatttatgattttgattgggccgaattattgcctgttgacgctaagtttcctgttcaaggtagagctgtaaaatccaaattgcactctgaaccagatgtacagtcaattgtaaaaaaggcaattgttaataagatggttgaccagtaccatcgtcgtggctttttgccagaaactggtaatgaatatcccttagatattcatatttataaaaatgtagctcgaatttcgctagatactacaggcgctagtttgtttaaacgtggctatcgagtagagcatggtggagcccctatgaaagaaaactttgcggccgggctattaaaactaactccatataatggtactcaccccttaattgatcctatgactggttcaggaactttagctattgaggcagcattaattgctaaaaatatagcaccaggaacctggcgtaaatttgcctttgatggttttgactggtttaaccctaaactacataatgaagtattggcaaaggctaagagtgaagttaagccgcttgaagcaccgatttgggctagtgatattgatcagtctgttcttgaagtagctaaattaaatgctcacaatgcaggtgtattgcaagatattcgctttaaacaaatcgcagttaaagactttactactgatctagaaaatggaattataattgcgaacccaccttatggtaagcgattgaaggatcgtgagtcggcagaagagctgtatcgccaaatgggagaagtacttagaccgcttagttcgttcagtcagtattacttaactgcagatcctaactttgaaaaatgttttggtgcaaaggctactaagaagcgcaaactatttaacggaaatttgcgggttgatttctatcagtattgggctaacagaaggtaagaaatgattacaaaagagcttaacacagaattttgggtgatctcagatacgcacctaatcgcagatagtttacatgatgaaggacaagccttttcacgcatgcaaaaaactagtcaaggtaaggatttgtattatcaagaaatagccctttctgcttttatgcgaatggcacaaagaaaaaagcctgccgcaattattgtaactggtgatgtgacatttaacggtgaacgagtttctgctgagaaatttgctcaaatttttaagccgttgaaagaaactaaagtgttagttttacctggaaatcacgacatttttgatgggtgggctagagaatttcgtggtaaaaaacagttctatgctggtgaaattagcccaatgttttggcgctcgatctttgataaatcatatcgtgaggccttagatgaagacgataattcattggcttacagtgtccaactgaatccgcaatatcttttagttttagcggattcaaatatttatggaaaagaagagacaacagaagcaccgcacactcacggcgaaattggaaaagtacaattaaaatggattgaaaaacaatttcgttatgcgcaggaacatcagttacgtccggttttatttatgcatcataatttatatgcacataatccagcagttaacaagggctatgtagttgatgacgctgttgagctacgacgtttgtgtgcgcgttacaacgtgaaattagctttttctggtcatattcatgctcaaaatattatgggaccacaagacatgacgcctacaactgagatcgttacatcaagtttttgttctaatgatcaaggctatggagtagtgcgagttcattcacggcacattacatatgtgcggcgtaattttgatatgacaagatatttaacggatgaggaaaaggaaaattatactttagttcattatcataagtatttaaaagatctacagcttggtagtatttctgcggatatgatgcaaagtgaattaaatcagtatcacgaagacatcgagttagttagggcgatggggaatttgtttggctggatgaactatcatttctttaatggtcataatcatataaaggctagcgagttgaataaaatccatgcttctaaagaatatcaagttttgattaagcaccatcctgagtatcggttatatctaaagacgctgtacgacacaagtgatcactctaatttacaagtgaagatacgatactaaacaaattttagtataatggatactgattctaaagaaagcggacatgattatgttaaaagatgaaacaaaatttgatcaattagggcaaaagctttttatgaaaggtgttttgcaagacttcgaaaagaaaaatggtccaattaagggcagaatgatggttacagaaggaaagattccgccggaaatgttaactaagctgcaatctgaattgatgaatagtagtaattggattgtagttgaaggtagttttgatttttataattatactgtcggcatgattgtagatttgactacaggtaagccattagcaaatggatggttggtaccacaattgggtcacccagggatgcaacctgcagagaaatggcaagaatttttgattgaaaaagtcgttgatgcaatcgatgaaaaaggtaagattaatttgccgctatatgtttggatttcagatcgtagtgatttgaccaagacggatcaagatttataaaaatatttttaattatgtaaagcttaatagagtagagggagttttataactcgcccctctcattgcaccggacgtacggttccgtatccggcgctacgtttgtgattatttacgagataaataatattctagcggatcgaccaagcctgggcgatccgctttgcttatgcccaatacttttgggctaagcagaaagttaatgacataacccgtacttcttttataccaacctaagcgcgtattagctactttatgaatatcttcatcactaaaattgcactttagtgccttgttaatccgcattaagttaatgtatattcgttttggtagtttccattgtttaatgattaccacccgtactttatgacgcagccattgactgaacttaattagaaaatatttcatgtcgccaactctaaagtaattgacccagcctctaactacttgatttatcttagtaaagactagtgatagaggctgagcagctgcttttctgcgacagagaagttctctcatcttgtcataaagcttgattttgcggtcatctcctggctttgcttgccagtattcgccacttttccagaaggtaaagccaagaaagttgctcttggttggtcgtacaactttggttttggttgcgttgacctttaggaatagctttctttctagccatgatgaaattgaattcatcacacgtttggctgatttaccgcttttgacaaagatattgcagtcatcggcatagcggacaaagcgcaggcctctttgttccaattctttatccattttatctaaatagatattggatagaattggtgaaagagggccgccttgtggtaacacctagtttattaggcttaacccaaccatcttccattactccagctttaagaaaggctcgaattaaatggagggtggttttgtcatttacttgctctctaattattgaaattaatttatcatgatttaccgtgtcaaagtatttctcaatatccaggtcaacaacccattgatagccttcgtttaaatattccaagacttgttcaatagcgtcatgagcactgcgtccaggtctaaagccatagctatgctcactaaaatgaggatcatagatcttcattaatacttgggcaatagcctgctggattactcggtcaacaaccgtgggtattcctaaaggacgtttcttaccattagctttaggaatgtagactctgcgaacagcttgcggacgatacttcatcttcatgatggcgtcctttatttctacttgatgctttttaaaatagctatcaagctcatcaactgttctcctgtctacaccaggcgctcccttattgattttgactctcctgattgcttccttgagattattttgacttaaaatctgttcaattagttccatctcgtgatatctccatttctacttgtaaatttattcagaattgtcccaattgctttcaccatcaaagagttacgttctctttgtgctaggctatcctcttatccggactgtctgaacattgcttatagcgagatatgctcttacaaacattaggcccttcgctccagtttcattacaaaaccttcagcactactacgacctcagctgacttctcgcgattaacctttttcgaccaggcttacgatcgctgatattaaagcttactcggtttcacctgtccacgagatctctcggggtaagacattcatctttaattttccactgccccctggtttaccgtcttggttttacggttgtcctttggactttaacttgtgctgcagtctcatccaccatttggcctgaccaggtttctgtacgtaggctcggaaaactcgctagccacttccttcacccatagcgtcaccgctaacggcttgtggttcgctacacttggcgacaactacccgtgatctagactttcactagactagacaaatgccatgcccgacacacaacaaaaaggtaggtcaattttgacctaccttttttaggatttatttattagtattaagaagttattgaattaagtaagtagatattatttaaccagtttaattttcaaagtgagctagttattaattgcctgagcagatttttgagcatcccaccaatcgggtaaatcacacaataacttatttaatgtattattgcggtgcgaaattgagtttctctcattgagattcatttctgcaaaggtttttcctagttctggaactacgaataaagcatcgtaaccatagttactgctaccatgtggatacttagcaattaatccactgattctaccagcactaacaatatcattgctttcttgacctggccaagtaaagacaaaggtagtgtagtagctagctgtccttttttcactagaaactccacctaaatagcctaataatttagctttatcatcttgaccattatggtggtaaggcaagattcctaaagagttaagtagataatcaacacttagacctgagctttctgataatgtaggcaaattggtaaattcagctaaacgatgtgctgtagctctagcattacttaaaaatgttgcctcagaatatgacttttgtggtgcataatctacttcagctaaaccaactactttgataggaagactaagctggttaagtttatcttgtaattcattaattttattttggtcatatgttgtaaataataaactagccattattttccccatgctttcaaaaatagatataccatttatattgtatccgctttcatatactgcacagtcattgtcttatctttgtgaagtaaagtcaagcatagataatagcttttatcaaaaagtccatatacttcaggtttttaaactgaataatgttatttttaatgactaagattgtgaaaattatagaaactgtcaaatcttttgtgtaaatagatctttctcgtaaattgattttttaattatttatttaatcaaagtaggattctaaggtgtcctgaacctgaccaaagcctttatgaattcgattgaaataacggtcattgtagctcattgcctgaatgccaataaaagcatcaagcgactgttcagttggaaactctgccttaggcttagctttgcgcttgatcacattgttaaatgattcaatcatgttagtcgaataaattgaagctctgatctgcttgggatagttataaaagaccagcagatctggttctatgtctttcaagcttctgataacatggctgtaaaccttgccccatttggtatagaagtcatgcaggacagctgtggcttcttctttgtttgtctgttgatgcacctgtttgaattcgttcatgatcttttcacgatcgtcgacgcgtactttagcgcagatattgcgcatgacatgaaccaaacagcgttgaaaatgagctttaggataagtcctggccaaggctgttttcatgccaacaacaccatcagaaagaaaaagctcaacttgctttaagcctcgggatttcatgttttgaagcatatctgtccagacttcaatgttctcgctaggtgcaatgcagtagtcaatgacctccttgtgcccattaggcttgatgccaatggcaatatagactgcttcacgctcaaatgtttctcggcgcaaaggaaggtatgtcgcatccaaatagacgcagaaaaacttgtcgcttagcttgcgtttgtggtaagcctcaacctttggaatcatctgcttggaaatatttgatacctgagctggactgtaatggctgccatacatcttttcaattagatcggctatttccctggtggtcacgcccttggagtaaagcttgataatcatgctttccaagatatccgagtgctgcttgtagtcaggcagcgtgtgctgatgaaattgaccgttgcgatcccgaggcacttgcacttcaattgggccaaattgcgtatcaactttgcggaaataagcaccatttctagagttgccagtattccagccatttctggcatagggatcatagcccagaaaggcagtcaattcagcttctagcaagttattaacagcctgttgtagttctttgcgcaataaatcatttattttgtctggattgaatagagcttgagcaaaatctttggtaaaatcattcatgaaggagttcttctttctgtatgtgttttttgtgttcaaaccaatcatacgagaaaggaactcctttttctaatgtttaaagaaataaatttaaggaatcattcatccttacacaaactattttacagtctcaatttctctgaggttgtttttttatatgaaaaaacgaaatacatttatcacactaaacttgtatcaaattacacaagatagagtgattaatcaattaataaaaaaataaaattcgccgattgtaaaattaacttgaacactttgtagaaaataaaagtccatttggacctgtttgatagaatgttaataaccacaaaaacatctatggaggtcaaaatggactcactacattttatcatggacaagcgcaaaaaaggaactcatttatcgctcgaagaacgagtcattattcaaactcgtttgaaagatcattgctctttacgctccattgcacgagaaatcggttgttctcctagtacaattcactatgagattaagcgaggaaccgttaagctgtatcatggcaatatcaaacgttataaagcccagcaaggccaaagcgtttatcaaaaccatcgtcagcactgtggtcgaaaatctgactttctcaaaaagcacaaatttattgattacgttcaacggcacttctttgaagatggctggtcactcgatgtctgcagtaatcgctgcactgctgtgggtgaatttgccagcagcgatattgtctgcaccaggacgctttataattatgtcgatcaaggtctattagatatacataattacgacttgcctgagaagcttaaacgcaatactaagcttcatcgtgttcgcaaaaataagaaaaaacttggcagaagcattgaagaacgtcctaaagagatcaataaacgtaatgagtttggccattgggaatgcgatttagttctcggacataagagcaaagatgatgaggtgctgctaaccttatctgagcgtatgagtcgtgagttcttaattcttcgtattcctgacaagacttctgtcagtgtcatgcaggcctttaaagaactccaaaggcaatacagcgaacattggaatgatatctttaaaactattacgactgacaatggctctgaatttgcagatctatctcagctggaagatatttcccaaaccttggtttattatgctcatccttatacatcttgtgacaaaggaaccgttgaaagacataatggactcattcgcagatttattcctaagggagaggcaatagacaattattcactacaagacatcatagacattgaaacctggtgcaactctttaccaagaaagatattggcatatcatacaccagatgaaatctttgaaaaggaattggatcgtatctatcaaacagcataagtgttcaatttattattgcaatttacgaaaaaataaaattgtattttaataaaaaagagaaaatcttttttagattttctcaatcccggatttaaaattgaagtgcaacactaagtgttaaacaaaaaggccatgaagacctaaacttgaagtgacgaaaaatcaagaaaggaagatctttatgaccaattcaaattctagcatttctaagcactatcatcaattaaccagcgtacaacgtggacaaattcaagcaatgctggattccggcataacttcccgtactgttatcgctcaagaagtcggctgccataagtcgacaatcagtcgcgaaatcaaacgcggaagtgtcctgcaaagagacagcagctatttattgtatgagcactattacgctgatactgcacagatttattatgagaagcgtcgcaaaaactgctatcagcgcaatccattgaagcattatgctgtctttttgagaatgctctccagacgctttaaagctaaatttgatgccaccagcatcgatgagttcgttggtgaattcaaaaggactatgccaggctacccttgtcccagcacaccaaccgtctatcgctatattgatcagggcttgctggacataagcaatattgatctgcctatgaagctcaaaagacgcaggaacaagcgtcatcacagccatggcggtcacgctttgcacaagaagcatcttggcaattccattgaacagcgtcctaaagagattgaagacagaaaagctccgctgcactgggaaggagatctggttaaaggcgtcagacgcaagaatcagcctgctttaatgactttgactgaaagaaccacacgctttgaagtagttatcaagattcctgactatcgggcaagcacatgccaaaggctgcttcaaaaggagattgacagacatcctgcctggtttaaatcaatcacgtttgacaatggctctgagtttgcggatatgaccaagatcaagggctgccagatttactttgctcacccatattctccatgggaaaggggcaccaatgagaactgcaatggtcttttgcgtcaattcttccctaagggcaagagcatgaaagacaagtcaaaagcttatgttcaacaggcaactgatgccattaaccacaaatatcgccgaatcctccaatatcacacagcagaggaactcttcaagcaatatatctcttcataacctaactgttgcacttaatttgacaattcaggagattttctcaattatgattaactagctattaaaaatttccataatgcattattggtgtaccagttttgcggttgaattgctcctagacaggctacaataatataaattgctaatgttgagattatgaatgcaatgcctaagttgacaatgttgaatggaaaggtagttttatgttgtttcattgcgatgtgaatggcgaaagccaacagaaccaaacctataataattccaaattgataataaatgctcattttctctcctaagttacagttaaaagtatacgttaaaatcggattaaagagtgatttttatttatctagcctctttattttatcaaaatcaatgttatattagagaggtagaaagaagattatgtacatatgtctgtagatatttacaatgaaaaacttgaaccatacgacgatggtaagcgtcataaatttagtggtacttttgatagattaaacgatcgcttagctatttttaaggatttgcgtattgcaggtgctggtggcaatccaattgttaagcagttagcactgcattacttgaaaactttcaaagaccttgatttgaagaggggcgatgtagttgaatttgaaggcatggttgaaaaagattctaacaatggcttcacaattgaacgcccaactcaagcagaaaaaatcagatcagcagctgccgatgatgctaaagttgacgtggttggcgatgattggaattggtttgaaaattagttaacggaagtgacttacgagatgtaagccgcttttatttttgaaatttaagtcatagctagaaatgtagtaaaattaagcttgtaaggagaattagatgcactttgatatctttaatcgaaaaactgtctcaactgataaaatgtttttccagacaacattaaatcctaagcaagcaataatcattggcaatggtgctaaatttcgacgttgggttttcttttctactaattttgctacattttatgtaatcattctgtcagctattagtattttattaattaagtctaatgtttctgtactaatttgcttactattagcattagcaaatttagtaattaatcgctcaatacctcgttattggcaaactttctttggcccgaatgctgaatatggaaaaaatcatcgtccagctattttgcctattttatatatcataaccttgttcggttggctttggagcgtatcacatttcgtaggatctttaacttttattactggtacatttgtgctagtaggtcttgcaggtagtttgttatcgctctggatatggatgaatttgaatactgttagttgtgctccaatcagtgaattacaatggcgaaacaatgccaaacgcaggggaatgtctgatgaagacattgataaggttattgctagtttaaaaaagcgtagagcaatatattttagtaaacacgataaataaaattatagacgaaagatagaatttaatgacagattttacagaatttgaaagtacaattttttcatcagacgataattttgccattcgaaaaattaaacataatgtcattttgacgtattgcactcaagatggtgaaaaagaatatgaaagcctaagtaagaatacatatcgtgtattttttgaaaataatcttgaagttagtcgactgtatccacctgatgaattcagtcacaattggctaatccaaattttaatgccgcaactttcaattgattcgctcaaatctatggcgattgccttaactacattagaaagaattgcgcaaagtcaagaaggcatgcaattatctgaatatgttaaaaatagtgagttagtagaaataaagtcctggtttgatctgcgtaataagttgcgaaaaatatccaaagcttatagcctaattaagcaaagtactgatcaaacaacacagtggctaggaagtgatggacatcgttatcgtgaagtgattttagccaatagtttacggcttaattatggtcaagatgaagttgttcgtttaattccaattaaaaataattgggttattcagtttgttaaaactgatttcagtgcaactgatggcgtaattgatcagctttttgcggcattaacattattgactcaatatgtaaaacaaatttaaatcagagatgaaacatattctttatgcccttaatgggacttttttaatgttactcgttccggctttatttgtattagcattacgacaattaagccatgaagctaaccaaaaattggtaaatacatttggttttaatagtcaaattattgttggcggattaggaattattgttcatgaacttagtcatttgattatggctataatttttggtcatcatattaatgcggttagtttattgcgcatccctagtaataccaatgatatgtcacttggctatgttaaacatacttggtctcctacatctacttatcaaaaggtgggtaatgcttttattggcattgcacctgtattaggatgcaccttgctgatttacataatcatgcgtacattgaatacacctatttcattggttcagaatcagcttactactcagttattaagtaatggtaatgcacttaactggaatttcttaactcatagttggatttatatttttgaattatttcagcttaattttgattcaatatggcactcaattgttgctttattgctagtaatcagtctatgttttggtggattcgatttaagcgaggctgatataagtagtggcaaatatgcttttttaggattaattggtataacctttattatgcttctcttagtttcttttctaggctttcacgctgcattattaccgtttttagttaatattactgtctggatttatttggtattcattatatcaatagtgattttagcaataattaatttaattatgtatattttaaatattattacgcgtggtgctagttaaatcgttttagttaataaaaaagtccaatcttgttagactcgacttgtaaatagtaataatagaaaagagtctgatctgattgaactgccttaagcttaagcgttttagccaccatttacaagttagttttaaagatttagtgataatttgtcggcactggtatcgtttgtatgcaccggctgagtttactcatcggcgaaatattgatcaaattaaaactacggacagtctgattttggctttacttatctggcaagctaagacaggaattgaatcacaaagaagattctgtgaatgtttcaattgtttatcacactcacgttttaatcggcgttcacgtcagctattgcaattgatttatcagatacggcaagaaatgaataaaaaggttgacctgaatggacagttcttgatcattgacagctttccggtacctgtttgccaaccaattcgaaactatcgtgctaaaatttttcgcggttatgccaacattggttataaggccaccaagaaaatttacttctatggtttcaaagttcatgccattgttagcgatgacggttacattcttgattatgtcgtaacaaaggcatcagttcatgatgccagggagacagttgaactgatagaaaatacccatccatctaattactatcttcttggcgacgaaggctatttaggcaaagaactgcatcaacagctaaaacaaatgggttacgaactttggacaccatatcgtaaaaatatgacaggagctaaaaagcacaatgatcatcaattgatggctattcgcagaacaattgaaagcgacttttcgcttctgacctattacaatgccgagaacaatcgagcacgtagtctgataggctttcaaagccggttggaaattgcaattttagcttataatttggcttattgtctagaacgatttaactagcaccacgcgtatattattttataaaggagaaaataatggcaaaagcgttattagttatcgactatagtaaagactttgtagctgatgatggagctcttacttgtggccagcctgctcaagcaattgatcaacgtattacagaactgtgtaaacagtttctacaaaataaagattgggtgattttcccgatggacgcgcacttaaaaaatgatccatatcaccctgaaactaaattatatccaccgcataatattattggaactgctggccgtgaagtatatggtcaaacgggtaaatggtatttagaaaacaaagataatgatcatgttttattaatggataaaaatcgttattcagcttttcaaaatactaatctagataattatttacgtgaacgccatattcatgacctgacactaactggtgtttgtactgatatttgtgtattgcacacagcgattgcggcatataatttagactatgaaattacaattccacgttctgctgttgctacttttacatcaaatggcgatgaatgggcaatggctcactttaaaaatgcattaggtgcgaatattgctgattaatttaatggcctgcataatttactagtaagtccaattattactatctaataaaaatatacattataattaatgtaaaggaaaaagctatgtaaagtgaagaggtcaaaatgtatacaaatattcgtaaatttaaaaagggcggaaactacccggaacagcaaaatgggctaccacaagcattttttcataatcccaagtataagaagttaagccccgatgcatgatacctatacatgatacttacgatgagaatgattgattcacaaaccaatggatgggtagatgctgacggtaatatgtatattatttattctaatcaagagctaatggatgacatgcattgcaattcttatacggtgaaacgactaaagaaagaattggttaatcatgatttgttactcgaagaagatgctcctgcagaacatgatgataggttatatcctttaagaattaatgaaaacgaaaaatgataaaagacattggtaaatacggccaatgtcttttatttagtattagtaaagaaaataactaatgtatccgcatcaggataaggctctgaatgaacacttaagaaattttgcagtttatgattgtattcaatattattttcactttgactattttgataaatttgctctagccagctcggttagccggataaatagcattgttcatggcggaacctacagcgttactttgaacgtcatttagtaaatatgatgtcccaatttgattaatttgattgagtaaatgatctatgcgttctatttcctgcttcttatcatgtacgtttggcacaagcagtagagagacggctgtaatatccatttcacattgtgcccaaaatttatcataaagcttgctaaagttttgatctgattgagctaaaagccattcctggtagatttttaaaatacgaattgttttttgaatatcatataaataaagcttacgataactaaactgctgaaattttcttgtaattccagaaagtagttctgtatagcaatctaagtcttcagcaattttaattgccgagtcatttttatttcctttctgtattttatttacattagctgatacttatataagtctatatgataatactgtactttctatacttttattataagatcatcgcatgatttgttaataataaaatgctcactaaaaatgttgtgacaatttattattaacaactaaaaaattatgatagtgtaagtagtaataattatgaaagagcgtgatgtaaatgtctagatggcatagattatttcctgaacgagtttttgatcgtggagaaatatattatggcaatgatatggttgaaaatattcaattagctcaagatcaggaacactttaccgctcaagttcaaggcggaatgggtcgttcttatactgtaactggtcgtcttcgtttggatggtcgagcttcagagttagactgtaattgtccatgggctaataaagggcatcgctgtaaacacgaggttgcggctttacttgcagtagaaaacgaacaagaaaatgaacataacgttaaagtcccttttgctgacttaatttctgaacatcttaagcaaatgattgcacataaaagcccagtacttaaccccttaaatttgattggcaatatgaaatttaccaaaaaaagttatgatcaggcactggaacttaatgatcactggtcgattagtagttgtcggcattttgatgataagatgcgtaaatatgaatatttttgggagatagtaacagaggacaatgagttaattacattatctgtgcaatttactcgctggcaaattatatcaattaaatttgatagtgatttttcccgtattgaaaaagatagtgttagaatattagctctgttttactttattaatgagtatcttgatgacgatccatttgatttaactaaccaggccgctgaagatctacttgaattttatagtgacgcttctacccaaaatgatgagccgattattttgcgggcaagtattgataagtataataacatccctagtttgacgtttaaattaggaaagaacaagcatctttataaagttaaagatcttaatcaactagtagatgcatcccgacacagctcttctctaaagctaggtaagtttttcaacgagcctataaatcaggctaaaatggatattgatagtcaacactggttatcttttattgaaaaaattatagatgctcgtaatctaaacgaagaattttattataattacagtagtcaggttggtcgcattacactagagaactctgtggccgatgaagttaatgatttactttatcaaggcgtaaagttgtactcaaatgagcagcctataggatatacaactgatcaactagatttaaacattaaaattgaaactcaaaagtcatctgctttagttagtgtagaggatcttccagtttctactataattactgggagtcatgcgtattatggctattacaaagatgtatggatcaaatatataggtcttacgcctgcttctttgcataatttaggattgcagcctggtgctgaaatgcaatttagtaaaaagaccgttgctaagtttgcacataatattttgcctaaatttgagcaaacaaagtttatattagtgtctggtactgatgaattgaaagctattttgccaccagaggcccattttttgtttaaattagattatcgtgtaggcagtattttatgtgtggctcgagtacagtatggggatgcacaatacgagttaaatcaaggatatactgaagaggaccgacgcgatgttgaaaaagagaccgcagcatggaagcacattaatacatattttagtgattatcagcatgggcggtatgttttatccaatgaagactcggatgtcgtacaagcttttctagatgatggtatcaatgagttgaaacgattaggcgaagtacaaattacagctaactttagatcacttttaaagggaataaagattaatttggatgttggagtaggtatcaacctgactaatgaattattagatatcgatcttgctgatcaaaagatgagctgggaagacattcaagcggctttgaaagcctaccaagaaaagcgaaaatattttgttttaaaaaatggaatgctagctaaggcagaacaaccgacaattgaacaattggcacaaactttgcatgatttaggtattagttttaaggatttcattcacggtaaattacatttaccagcatatcgtgccttttattttgctaagcaaatgaaagctgctaatgcactgcatttctcaactaatgaatcctttaatactctgattaatgatttagctaagaatcagttgaagcaaaatcaaataccagttagtttgcaaaatattttgcgtccatatcagaagataggttttaattggctaagcactatcgttaattataaatttggcgggctacttgctgatgagatgggattaggtaaaaccttgcagattattagtcttcttttagctcgcaaagaaaaaatgcaaaatcagttacctagcttaatcgttgcgcctgcttctgttatctataattggcaggcagaagttaaaaagttcgcacctagccttaatgtggctctattagatggcactaaaaaagaacgagagagattgcttttagatgctaaaaagtataatctgctaatcagttcatatcaatcgcttaatcgagatctagaagcgtaccaaaatctaatttttgatgtagaagtaattgatgaagcacaaaatattaagaatcagcaatcagttaccgccaagacagtcaaagtcattaaagcgcatcataaactggctctaacaggaacaccgattgaaaataaattgagcgagttatggagtatttttgattacttaatgccaggttttttaggtttatatcctgactttaggaaaaagtatgaattaccgattgttaaagagcaagataaagaagcagaagatcaattagctaatatgataataccctttatcttgcggcgtctaaaaaaagatgtgctacgtgacttacctgacaaagatgaagaaattgtgcctgttaaaatgaataagaaacaagctgatttgtataatatgcagacgcaaaagattatcgctcaattaaatggacagggggatgaagactttaagagatcacgttttcaaattttggctcagattactaaattacgtgaaatttgttgtgatcctcatttgctttatgaaaactatcacggcaagtctaataaattaattgctacaattgagttgattaagaataatctagcaaatggacataaaattttattgttttcacagttcacagctatgctagatattttgcatgaaaaccttgccagattaagactacctttatttactattactggatcaacacctaaaactaagcgtcaagaacaagttcaaaagtttaatcaaatggctcaaccaggggtctttttgatttcattaaaagcaggcggaacaggcattaacttgactggtgctgatgttgtaattcattatgatccttggtggaacttggctgcagaaaaacaggcgacggatcgagctcatagaattggtcaaaagcattctgttaagatttataagatggttacagaagacagtattgaagagagaatcattgctttacagcaaaagaaagcagaattagctgatataattttgcaaaatgatcagattgctgatgcaacaatgagtaaagacgatttaattaagattttgaaataaatagatcattataataaaataaaaatatttgtttgtacttgcgaactattgtttgcaaaagtataatatttaggtaaacaaaaaccaacaagctaaatgcttgctggttttataattttagtttgagttagtatgtttctttttataccaatacactagaccgaatggaaccagattctcttggtgatgttcgattcgaataatattgcttcggtgactccagtaaattaagattacgagcaatccactgataatgctcaaggcaagatcgtggaaaaagaatgaagcaataaagattagaactactgagatcaaactagttaatgaaaccatacttgtaataaataagatagggaagaagattaacgcacagatcaagaaaaaatggacattatatcctagtaaaaatccagcggaagttgctactgccttgcctcctttgaactttaaaaagacaggaaaagcgtggcctaaaattgcagctaagccaaaaatcaagcaaagataatgtggtcctagtttaaaaattattggtaatactgtagcaaaagttcctttgagaaaatctactataaagacaatgattccagcagctggtcctaatactctaaaggtattagtcgttccgatatttccagatccgtatttcctaatatctttatgaaaaaagatattacccactaacacacctgttgggaatgatccaatcaagtatgctaaaataaacaacgatgcaaattttaatgcaaacatatttaacaacactcctattaatctatcgctattttagcaaagattatcttttaaatatatggtgctggttaaattaatgaacaagtggaggaattttagtggcaaaagctaatacttatgatgattcttcaattcaaattttacatggcctagaagccgttcgtaaaagacctggtatgtatattggttcaactgatattcatggtcttaatcaattagtgtatgaaatcgtcgataactctgtcgacgaagccatggctggttttggtaaagaaattgatgtaatcattcattcagataatagtgttactgtaagagactttgggcgtggtatgccgacaggaatgcacaaatcgggtaagcccacaattgaagttattttaactgtattacatgctggtggtaagtttactgaacaaaattataaaacttcaggcgggttgcatggcgtaggttcatccgttgttaatgcactttcaagttatatgaaggttagagtcgttcgcgatggtaaagcttatgaagaagaatttaaagatggtgggcatccggtaggtacattaaagtgtgtaggaaagacaaaagagccaacagggactaccattacgtttaagccagatgagactatcttttcaaccacgaagtataagtatgagacaattcaggagagaattcgtgaatatgcttttctacttaaagggggtaaatttttcttaacagatgagcgtgagccagaacatcatgatgtttttcagtatgatgatggaattaaatcatttgttaagtatttaaacgaaggtaaaggcacaattagtgatgtcttttattttgaaggcaagcaagatggcatggaaattgaattttcaggtcaatatagtgatggatattcagaaaatttagtttcatttgttaacaatgttagaactggtgatggtggtacccatgagtcaggtgctcgtagtggatttacacgtgcatttaacgattatgctaaaaagcagggtctactaggtaaaaaagataaaaatattgatggttctgattatcgtgaagggcttagcgcggttttatctgttaaaatccctgaagaattacttgaatttgaaggacagactaagggtaaattaggtactccacaagcacgttctgctgtagattcacttgtttatgagaaaatgtcttactatttaatggaaaatggtgagctggctcaggaactagttaagaaggctcaaagggctagggatgcacgtgaagctgctaaaaaggcacgtgatgaaagcaggaatggtaaaaagagacgaaaaaaagaagttttgtctggtaaattaacgccagctcaatcgcgaaatcctaaaaagaatgaactattcttggtcgaaggtgattcagctggtggatctgctaagcaaggtagagacagaagatttcaagcaattttgcctcttcgtggtaaagtattaaatactcaaaaggcaaaattgcaggatatctttaaaaacgaagaaattaataccatgatttataccattggtgctggtgtaggaaccgagtttaatgttgatgactctaattatgataaagtcattatcatgactgacgccgacgatgatggtgctcacattcagatcttgctattaacattcttttatcgttatatgcggccgatgattgaacacggaaaagtttatattgctctgccaccgctttatcgcttacaaaaaggtcgaggcaaaaagacgcaagttcaatatgcatggactgatgaagaactagctgatgatgaaaagaaaatgggacgtggctattcgctgcagcgattcaaaggtttaggtgaaatgaacgcggaacagctatgggctactactatggatcctcaatcgagaatgttaatcagagttaaaattgacgatgctgctcttgctgagagacgagttactaccttaatgggtgataaagtagccgcaagaagaaagtggattgaagaaaatgttaaattcagaatgggcgaagacggctcaattctagaatccgaagatgaataaaagaaggttttaaatttaatggccacaaaagaacgaattcgagaaatgccacttgaacaagtaatgggtgaacgttttggacgatattcaaaatatattattcaagaacgtgctttgcctgatattcgagatggcttaaagccagttcagcggcgtatcctttatgcaatgtatcaagatagtaatacttatgataaaccatttaaaaaggctgctaaggctgtcggtaatatcatgggtaactttcaccctcacggtgacagctcaatctatggggctttagtgcacttatcacaagactggaagatgcgcgaaccgttagttgaaatgcatggtaacaatggttcaatggatggtgatggcccagcagctatgcgttatacggaatcccgcttaagcaaaatctctaatatgcttttgcaagatattgataagcaaaccgtaaacatggtgcttaactttgacgatactgagtatgaacctacagtcttacctgcacgctttcctaacttattagttaatggatcaactgggatctcatctggttacgctacagagattccaccacataacttaggtgaagtgattgatgcaacaatttatttattgaaacatcctgatgcttctcttgaagatttgatgaaatatgtaaaaggccctgactttccaactggtgctattgttatggggactaagggaattaaggaagcatataagacaggacgtggtagaattcaagtccgtgccaaaaccactattcaagaaattcgtgggcataggcaagaaattgttgctacggaaattccattcgatgttaacaaagcactattagtaaaaaagatagatgaaatccgtctgaataaagaaattgatggaatcgcagaagttcgtgatgaaactgaccgccatggtttgtcaattgtgattgaattgaaaaaagatgctgatgcgcagaatattttaaattatttatttaaaaatactgacttacaagtatcttataacttcaacatggtcgctattgatcacatgactcctgttcaagttgggctaaaacgaattttagcttcttatttagaacatgaagaagacgttgtaactaaacgtacgaaatttgacttagataaggcagaagctagattagagattattcagggcttgattcatgccatggatattttggatcaagtaattaaaaccatccgcgcttctaaaaataaagccgatgctaagaagaatttaatagctaagtataataaatttactgaaaaacaagctgaagcaattgtttctttacaactttatcgtttaactaatacggatgttaatgaattaattgctgaacaagacaagttaaataaattggccgaaaaataccgtaaattattatcagatcgtgcaactttagaaaaagaaattattaaagagttaaatgcagtcaagaaagaatttgctaatccacgtcgaactcaaatttcagaagaaagtgctaaagttgaaattgatgaaaaagccttagttgctgatgaacaggttagagtactaattagtcgagatggctatttaaagcgttcatctttacgttcatatcagtcaactaatgatgatgacaatggtttaccagatggtgacaaagtagtttatgaaaacacactatctaccctgactaacttgtatttatttaccaataaggggaatgtcatttatcgtccagtacatgaactaattgaaaccaaatggaaagaaacaggacaacacctatcacaagaaattggattagacagtgatgagcaaattattcgcgtctttgtatttgataaattgaatactgattgcaactttattctggctactaatgacggttatatcaaacaattggagttagctaacttacagccgacgagaacttataagtcacgtgcaatgacagctatcaagttaaagggcaaggatagttatgtagttggggtagatttgatcaaatcagataatcataaggaaatcacattatttactcatcgcgcctatgcaattagatatgatgttagcgagataccaacttcaggagctaaagcagtaggtgttaaatctgctaacttgaaagatgacgattatatcgtaaattatgtcctagttgattctaagtatgttgatttaatgcatgttgggctaattactcaacgtggggcatttaagcaattcaaacttaaactagttaataaagtttctagagccaagcgaggggtactagtactgcgggaattgaagaataaaccgcatagaattgttgctctaatgccatatgctcaagatcatttgttacatgtcactacttctagtgaccgtcatgtaaatattaaaactacggattatccattaggcgatcgttattctaacggctcatttgttattgatactactgttgatgggacgcctgtaagtattgaattgggaagacccattagtagtcaaaattaagatttgagtttaactaaaacaatatattaatctttaaaaacagtgttaagacatatgttttgacactgttttgttttggatagataatagcagtgttatgggacatggcttatcgtaaaataatattttaggaaagagataatcgttatgtctaaaagtgatactattttatcggctaaatcattgcgttattttttacaattgattgagacgatgaattatacccaagctgcacaaattttaggtattacccaaccggctttaactcagcaagtaaaaaaattggaacgcgctattggtgctccattatttggacaaatggggaagaagttatacctaaccgaagctggtaaagaaatggaagcagcagcgatagagttgctaaataccattaatggtgttattagtgacattcaagaatatacccagtcagataaaggcaatatttcaattggtattctagagtccgtacatgttgatcttttctaccaatttttacgttacttcaataaaaagtatccagaagtaacttttactgttgattactttgaccgcaaagagctatggcacagacttgattccaatatgattgatatggcgattatgtatatgccagatactactaataaaacaggagctaatttccgtcatcaatacaatcatcgtgatatttgccctgagcatattgttgtactgactcacaaggataatgtggaagcaggagggacatattctgttactcgttttggcaacagaaagtgggttgcatatccggagaattactacttatcaagattaatgcgacttaactttagtaaaaagattgatctcgttactccgtttaaaattgcatctactaaggaaatgatcaaaattgcagaaaatactgatcttgatacttatgtagatcagacttactatgaggcgcataaggatgagattaatttgactcctgtttatattaaaaatatgcctgagtttacgactgcttgtgtttatcgtagaggaaaattagatgttcctaggatgaagaaattactaacggaattacagattttcttagacaataacttggataggaaccataattttagtaaactattaagtgaagaaattaaataaaataattagaaaaagaggcaatttatttaatggaaaaagaatttgtttttggacaccaaaatccagatactgatgcaattggcactgctattgcattttcatatttgcaaaacaagttaggttacaacactgaagccgttgccttgggtgagcctaatgatgaaactgcatatgctcttaaaaaattcggctttaaagcacctcgtgtaattaaagaagctgctccagaagttaaatctgttatgttggttgaccacaatgaaccacaacaaagtgtttcagatattgacaaagttaaggttactcatgttgtggatcaccatagaataatgaattttaataccgctgatccattatattaccgtgcagaacctgtaggctgtacttcaaccattgtttggagaatgttcaatgaatttggcattgaaattccagaaaactacgctggtttaatgctttcagctattatttcagatactttacttcttaaatcaccaactactacagataaggataaaaaggctgtagaagcattggctaagattgctggcgtagattacaaggaatacggcttagcaatgcttaaggctggtactaacatcagtgacaagtcagaagaagaattgattgatttagatgccaagagctttgaattaaatggtcacaacgtccgtgttgcacaaatcaatgttgttgacttacctgaagcgttagaacgtaaggaagcctttttaaaggcaatggatgcttcatctaaggataatggctatgatatgtttatgcttttaattactaacattcttgactcagattcagaagctttagttgttggctctgatgagactaagtcattattcgaaaaagcatttaataagcaacttagtgattcagaagttgaattacctggtgtagtatcacgtaagaagcaggttgttccacctcttactgatgcttttaatgcttaaaagtaatgatgtaaaaaataggaggtagggttaaccgcctcttattttttacctaaaaattaaaactgattttaggagaaaaatattgaaatacccacaattaaatttagaaaatcaacagggaccaacagctgtattgaaaaccaatcaaggtgaaataaaaattcaactttttccagaacaagccccaatgacggttgaaaattttattcgtttagctcaaaaaggctattatgatggtactatttttcaccgcgtaattagcgattttatgattcaaggtggagatcctgaaggaaatgtcactggtggtgaaagcatttgggggcatccatttgaagatgaactttcacgagaactttttaatattcgcggagcattatcgatggctaattcaggccctaacactaatggtagtcaattttttatcgttcaaaacaagaatatgcctaagcgttacataaaacagatggaacccgcaggctatccaaaggaaattattcatgcttataagcaaggcggaactccatggcttgacggtcgtcatacggtctttggacaagtaattacaggcatggatgtagttgataaaattgctaagtcgaaaaaagataaaatggataaaccactagaagatataactattgattcgatccaagtccaaggatcaaagtttgatgactaacaaaaacgtgctgttttttcggaataaacagcacgtttttgttaattattcatttcttttagaagggtgatcaaagacttacatacgcgttcagccttaggttctggtaattttcttaattcgttaataacttttttcatgaaaacgggtgtattgttatcatgaattttttcaggcttgatttttttagcacgataggcattgttaatgatatcgggtgtagtagtattcaaagctttggcaatagaatcaagcttctgaatactaatgttttggtccttagtcctttccacacgtgaaataaaatttacagaaagatcacttagctcagccaaatcttcctgtgttagtttctgttcacgtcttctacgagaaatttcttctcctaaattaatattcacaagcattcgatcctttcaagtaacttatagcctatataaaattatgtaaaaaatgaatagactattttaatattctcaacatacacttatattaaataataagaaattatatttgtttataaatgtacatttttagcgtaatcagtgctattaggcactacagtttagaaactgtcaaatcttttgtgtaaatagatctttctcgtaaattgattttttaattatttatttaatcaaagtaggattctaaggtgtcctgaacctgaccaaagcctttatgaattcgattgaaataacggtcattgtagctcattgcctgaatgccaataaaagcatcaagcgactgttcagttggaaactctgccttaggcttagctttgcgcttgatcacattgttaaatgattcaatcatgttagtcgaataaattgaagctctgatctgcttgggatagttataaaagaccagcagatctggttctatgtctttcaagcttctgataacatggctgtaaaccttgccccatttggtatagaagtcatgcaggacagctgtggcttcttctttgtttgtctgttgatgcacctgtttgaattcgttcatgatcttttcacgatcgtcgacgcgtactttagcgcagatattgcgcatgacatgaaccaaacagcgttgaaaatgagctttaggataagtcctggccaaggctgttttcatgccaacaacaccatcagaaagaaaaagctcaacttgctttaagcctcgggatttcatgttttgaagcatatctgtccagacttcaatgttctcgctaggtgcaatgcagtagtcaatgacctccttgtgcccattaggcttgatgccaatggcaatatagactgcttcacgctcaaatgtttctcggcgcaaaggaaggtatgtcgcatccaaatagacgcagaaaaacttgtcgcttagcttgcgtttgtggtaagcctcaacctttggaatcatctgcttggaaatatttgatacctgagctggactgtaatggctgccatacatcttttcaattagatcggctatttccctggtggtcacgcccttggagtaaagcttgataatcatgctttccaagatatccgagtgctgcttgtagccaggcagcgtgtgctgatgaaattgaccgttgcgatcccgaggcacttgcacttcaattgggccaaattgcgtatcaactttgcggaaataagcaccatttctagagttgccagtattccagccatttctggcatagggatcatagcccagaaaggcagtcaattcagcttctaacaagttattaacagcctgttgtagctctttgcgcaataaatcatttattttgtctggattgaatagagcttgagcaaaatctttggtaaaatcattcatgaaggagttcttctttctgtatgtgtttttttgttcaaaccaatcatacgagaaaggaactcctttttctaatgtttaaagaaataaatttaaggaatcattcatccttacacaaactattttacagtctcacagtttatagtatagtcttaaattgaatacttttattgttaaaatagaaatgaaataaaagctaaaaaaaatatactaattattaagtttttaagcttataatgtatacaaggatataaaaatagattggggatttgatgagtttaaaagaggttttaaatagtaatcggcctgcagagtcacgacaattagcgtgtgcgttaactttttgtgggggatttattgatgcatatacatatatccagagaggacatacgctttccgctggacaaacaggaaacgttatcttttttagttcagcattagctgatcataatgttcctggaatgattaatcgagctagtacgtttattgctttttctttaggattgctattagtaggactttttcataaatatgtgaaaagtcactattggagagtattttgcttatttccaattttagcgatttgtattgtagtgggctttttgcctaaaagtgttcctaattattatattgtgcctgctattgcgtttggattggctattcaaaacgcatctttcagcaaaattgaaggcatgggttataacaatgcatttacaactggaaatttaaaaaaatcggttgttgcatggagtgcatttttttttggtgaagacaaaagtaaacatacagctgccgttaattatatgatgttaacaattgcatttgcagttggagcaataatttcagctttactgcaaaaattattggtattaaaaactatttggattgcagtcatttttttaacgacgattaatttagtttatatcattgcattgagacgaaataaaaaaattgatttttcaaaatgattttaaaagcacttgtcataattggcaagtgtttttttgaagaggttgtgagtgagaagaaagcgaccaatctgaaaaataataattttataagtgtgcgtataattaatattatgtaaagtcagattgaaaaacaatcaatttaataatagaagtcataattaatttaattgtttcagcaaataagtcttattttggatttgttaactcgaattcagagactgtaaaatagtttgtgtaaggatgaatgattccttaaatttatttctttaaacattagaaaaaggagttcctttctcgtatgattggtttgaacaaaaaaacacatacagaaagaagaactccttcatgaatgattttaccaaagattttgctcaagctctattcaatccagacaaaataaatgatttattgcgcaaagagctacaacaggctgttaataacttgttagaagctgaattgactgcctttctgggctatgatccctatgccagaaatggctggaatactggcaactctagaaatggtgcttatttccgcaaagttgatacgcaatttggcccaattgaagtgcaagtgcctcgggatcgcaacggtcaatttcatcagcacacgctgcctggctacaagcagcactcggatatcttggaaagcatgattatcaagctttactccaagggcgtgaccaccagggaaatagccgatctaattgaaaagatgtatggcagccattacagtccagctcaggtatcaaatatttccaagcagatgattccaaaggttgaggcttaccacaaacgcaagctaagcgacaagtttttctgcgtctatttggatgcgacataccttcctttgcgccgagaaacatttgagcgtgaagcagtctatattgccattggcatcaagcctaatgggcacaaggaggtcattgactactgcattgcacctagcgagaacattgaagtctggacagatatgcttcaaaacatgaaatcccgaggcttaaagcaagttgagctttttctttctgatggtgttgttggcatgaaaacagccttggccaggacttatcctaaagctcattttcaacgctgtttggttcatgtcatgcgcaatatctgcgctaaagtacgcgtcgacgatcgtgaaaagatcatgaacgaattcaaacaggtgcatcaacagacaaacaaagaagaagccacagctgtcctgcatgacttctataccaaatggggcaaggtttacagccatgttatcagaagcttgaaagacatagaaccagatctgctggtcttttataactatcccaagcagatcagagcttcaatttattcgactaacatgattgaatcatttaacaatgtgatcaagcgcaaagctaagcctaaggcagagtttccaactgaacagtcgcttgatgcttttattggcattcaggcaatgagctacaatgaccgttatttcaatcgaattcataaaggctttggtcaggttcaggacaccttagaatcctactttgattaaataaataattaaaaaatcaatttacgagaaagatctatttacacaaaagatttgacagtttccgaatttaggttatttattttttcaaaaatgaattttgcttttttaatttttgtttttacttcatttactctgactatgataagaaaatcaactctcaataaatttttacatgctgagatcgcaattctatgaccaagttcatttattttgatcaatagttttatagtttaatagttagttgttcatttgtatgaaccagtttttaaaagtaatggttttattgatggttggaattatagtttttcatcaagttaatcaagctagataaaattacttttatggctaagagtaaatcaatggtatcctagatattcttgaaataattttttagatgattagttatctgtatattttatggctaaaagtctgaattgaataatatgctgacaataatcaataaaacaaccttcaaagagaagtattttgaaacaattatggtaaagtaattctaattaaaaacaatgaaaatagttgagtaatatttgctagttttgcctttagtatctataaagccattttttatttttatgctatagctttctttaaaacaaaaattttaatgatcgctagataaacctatctcgcaaaagcctaattttggtaaatttgtgcttttgttatttttattgttttaacgttttgtatttcattttaaattcgtaaaaaaatattttataaattctttgctctttttgctacatacaaatcggtattaagtgcttttatatttattcttattccctatttttaagatttgctgcaataatacacatattgaaatttcttaaataaataatcaagcggtaaaaatgataattctactaaactcatgactcaagtcgctacttaaatctgtgtttttacatgaataagacatctaaataaagtttcaatcttcaaaaaatgctgagaatcactctaagatttctttttaatgaattaatttatcgtggttactcaatctttatacaaacaagcaacattttaattcattattatacctctatctcccctcctctgctgaccagggaagacgaaaaaagagccgaaatcagacataattcgtccaatcaggctctttgcttatctagctagaataaaaatctgaataaactcaatctgttgcaggtctaattttattcataatgaaggcaacgacgattaccaagataactgcacctaaaattgacggtacaattgccatgtccgcaaccttcggtccccattcccctaaaagggcttggcctagtgaagatccaaccaatcctgctaaaatattagcaatccagttcattgacttaccatgtccagttaaagcacctgcaattaagccgattactccaccaacaattaatacccaaatccaatgtagcattttgatcacatttgctttcttgcaaaatatcttatcacatttctgattaaacaaagcgctttctttaactatctttattttgagactgtaaaatagtttgtgtaaggatgaatgattccttaaatttatttctttaaacattagaaaaaggagttcctttctcgtatgattggtttgaacaaaaaaacacatacagaaagaagaactccttcatgaatgattttaccaaagattttgctcaagctctattcaatccagacaaaataaatgatttattgcgcaaagagctacaacaggctgttaataacttgttagaagctgaattgactgcctttctgggctatgatccctatgccagaaatggctggaatactggcaactctagaaatggtgcttatttccgcaaagttgatacgcaatttggcccaattgaagtgcaagtgcctcgggatcgcaacggtcaatttcatcagcacacgctgcctggctacaagcagcactcggatatcttggaaagcatgattatcaagctttactccaagggcgtgaccaccagggaaatagccgatctaattgaaaagatgtatggcagccattacagtccagctcaggtatcaaatatttccaagcagatgattccaaaggttgaggcttaccacaaacgcaagctaagcgacaagtttttctgcgtctatttggatgcgacataccttcctttgcgccgagaaacatttgagcgtgaagcagtctatattgccattggcatcaagcctaatgggcacaaggaggtcattgactactgcattgcacctagcgagaacattgaagtctggacagatatgcttcaaaacatgaaatcccgaggcttaaagcaagttgagctttttctttctgatggtgttgttggcatgaaaacagccttggccaggacttatcctaaagctcattttcaacgctgtttggttcatgtcatgcgcaatatctgcgctaaagtacgcgtcgacgatcgtgaaaagatcatgaacgaattcaaacaggtgcatcaacagacaaacaaagaagaagccacagctgtcctgcatgacttctataccaaatggggcaaggtttacagccatgttatcagaagcttgaaagacatagaaccagatctgctggtcttttataactatcccaagcagatcagagcttcaatttattcgactaacatgattgaatcatttaacaatgtgatcaagcgcaaagctaagcctaaggcagagtttccaactgaacagtcgcttgatgcttttattggcattcaggcaatgagctacaatgaccgttatttcaatcgaattcataaaggctttggtcaggttcaggacatcttagaatcctactttgattaaataaataattaaaaaatcaatttacgagaaagatctatttacacaaaagatttgacagtttctttattttaagcgaatgaactatttcttgtcacttttaaaatatattatttgactgtcttatacttttctttagatttggggcatatttcttgccacgactaattctttattttttgtctattgtatatctcaatttgatttcaatttttttcggtttgattactgatatattaataaatgatctcatctattgccttttgagaactatatctgtagtctataaagtataaattatgtgagagatatagataagattctctccactaagtatggaggacataaattgtttaaaaggaaatcaattattaaattagcatgtgcaactatgttaacgaatgcaggtgtcacacttttatctcaaatgactcgtttctctgactcagagagcattgtgcaagcttcatcaacatcagttgttgctaaagcccttggaattgatgttgccagctaccaaagcgcagatttaactgctcatgccaaggctggttctcaatttgcaatcgttaaagttagtgagggaaccagttatcgcaaccctaaggcagccaatcagattaaatctgctattgctaatgatatgatgccgatggcttatcattttgcaacttttagttcaagttcatcggccgctaagcgcgaagcgcaatacgcaatttcttctgctaaggcgttgggattaccagctggctcatacttagcctgcgattatgaaactggtcagggcaatatcattactaatggtaaaaatgtgacagctaaggctattattgcctttatggatcaaattaaggcggctggctatcaaccacttctctatgctagttcttccgttttgcaaaacaatattaatactccatctatcgtgaacaagtatcctaattcactctgggtagccgcatatgcgatttcaggccgagtagaccaacccaactttaaatacttcccttcaatggatggtgtcgcaatctggcagttcacagataattggcgcggaatgaatactgatggcaatattacagtcttgccattatcaatcgcaggtaacgcggcagtttcacaggctcctaaggcttccaataccaagaaaacagctacagttatgtacaagtcatatgtttatgacaaaaatagcaaccggacaaatgatttttataatgcttacagctctattgcttattatgacaataaggtgagaattaaaggcaaatcaatgattcgtgtcggtgaagacaagtatgtgatggcaagtaacgtactaggcaattcacgcgtctttaaagctgatgctaaagtgtataaaaatgatggcaccattaatacaaaatggtctactaaaaaatccggttcaccgatcaagacttatggccctaaacattacatcaataatgaagcttactatcgaattggtaaaaatgcttacgtcaaagcagacaagttctaatttatttttagcagcaaatatttgctgcttttttgatgcatccctaaaacgtaaatgaactgacaaatcatttccaatttatttatctgcatcccttttttatccatgttaaaattaaggcattatatagaaacgaggataagataaggatgaaatttaaaaagaagttagctttattcttaggtctgggagtattattgctttctctgactggttgtagtgattttcaaaactgggaattatctatgcgctctaagattggggcattgcccttaacagtatcaacgtatgattctaatggacaaaagatcgaccagatcaaagctaagtcagttaatattcatactgataaaaagatgtcacagaaaagtagtaatggcactgaacattctagcgtaattgatgttgactatggcaataatcgaatgattcacgttggttctactatgattgcctatgaaggactgaaaaactacgaggatgcatttaacaaaaaagttaagatcgacgatcaaaatcgttctgttcctctgttaaatacaatgtatcagaattttaaaaacgattggaatggtagctcaagagtagtaatgattagaagccaattaggaatgccgattgctgtctttattggaaatcacgtctcaattcataagagtgatatgaagaatgcaactcaatttgtgattgatggtcatcgtctatttgtttaccgtgctgattacacagtttatccaatgtccagtttaaaaagcaattaactataaaaagtgtcaatcctcattttaaggactgacactttttattatttatcatcaattaatgcattaaatgcttcattagtttcaacgatgtcgctcattacttgattaatccagtcattaagcttatcgttatcgtagttttctaaaccgccttcggaatctccaatgtccgcaataccattattgaaatctactagttcagtaattaacttttgagcaaaaatcttagtggtaccaccaaagtttttcgcaaaattatttacatccccatatgcatcggcaatatcactgaaaactgtgacagttttaccaaaagtctcactcaagttatctacatctgcttgagttggtacagtcaattcttcatcttcattattaagttgttcatctaaacgaacgccaatgtcgtttaacactaagtgaccatcatatagacgattcagtaatttgataccactagggtttttagcttggaagtttacactaatttcttctgtcatactttttcctcatctcacataatgtattttcatctattgtacaatttttagccaaaaaatacgactaaacaaggaaaatagaaactgtcaaatcttttgtgtaaatagttctttctcgtaaattgattttttaattatttatttaatcaaagtaggattctaaggtgtcctgaacctgaccaaagcctttatgaattcgattgaaataacggtcattgtagctcattgcctgaatgccaataaaagcatcaagcgactgttcagttggaaactctgccttaggcttagctttgcgcttgatcacattgttaaatgattcaatcatgttagtcgaataaattgaagctctgatctgcttgggatagttataaaagaccagcagatctggttctatgtctttcaagcttctgataacatggctgtaaaccttgccccatttggtatagaagtcatgcaggacagctgtggcttcttctttgtttgtctgttgatgcacctgtttgaattcgttcatgatcttttcacgatcgtcgacgcgtactttagcgcagatattgcgcatgacatgaaccaaacagcgttgaaaatgagctttaggataagtcctggccaaggctgttttcatgccaacaacaccatcagaaagaaaaagctcaacttgctttaagcctcgggatttcatgttttgaagcatatctgtccagacttcaatgttctcgctaggcgcaatgcagtagtcaatgacctccttgtgcccattaggcttgatgccaatggcaatatagactgcttcacgctcaaatgtttctcggcgcaaaggaaggtatgtcgcatccaaatagacgcagaaaaacttgtcgcttagcttgcgtttgtggtaagcctcaacctttggaatcatctgcttggaaatatttgatacctgagctggactgtaatggctgccatacatcttttcaattagatcggctatttccctggtggtcacgcccttggagtaaagcttgataatcatgctttccaagatatccgagtgctgcttgtagtcaagcagcgtgtgctgatgaaattgaccgttgcgatcccgaggcacttgcacttcaattgggccaaattgcgtatcaactttgcggaaataagcaccatttctagagttgccagtattccagccatttctggcatagggatcatagcccagaaaggcggtcaattcagcttctaacaagttattaacagcctgttgtagctctttgcgcaataaatcatttattttgtctggattgaatagagcttgagcaaaatctttggtaaaatcattcatgaaggagttcttctttctgtatgtgtttttttgttcaaaccaatcatacgagaaaggaactcctttttctaatgtttaaagaaataaatttaaggaatcattcatccttacacaaactattttacagtctcggaaaataagcttttttcgattctttataaaaaatgttatattttacttgaacattagcaataaagagcataaaataaacgattgaaaagtgttgtaccatacaaacaacatatgtttgtaagtaatgtttgaattactaaatgtaatttgcccttacttactgacgagcaatcactgttgctataattagaatgctaagagttttctataagcgttgctggtattctagttatagtgacatgattatctaagttaaatttagttgcaatcatttttctacgttagtactatagatattcacgttcgaatgagcgcagtaattttaaattagactgttttttatcacctattcctgagaataggtgatttttttatgattaacgtatttgtatgatataatataaacattagttcgcaaaaggagtagatatggaaactgctaaatacctagaattgatccaaattgaagtaaataaattgcctgattttgttaagcaatttaatcttggtactaatcattcattaactactacttaccagtacttaactgaaattcgacgcttcttcgattggctacgtcaagaaaatatctcttctgcttcagataatgctcatgttactacggatacattagccaacttacgtcgcaatgacataatgctgtatattgattatttaggacatacccgtaataagcaaggccgactaaactcccccactacgattaatcgctcaattaatgctttacgctccctatttaagtttttaaccattactgccgacaataatcatggtgagccatattttgaacggaatgtaatgcttaaaattaattctttaaatgatacgcaaacacttaattatcgggctcatgtacttgaaagccacatgtacactggtaagttaaaatttgaatttttgacttttattgatcaggactatattaaccattgtaataagcaagcaaagattggttttaagcaaaacaaagaacgtgacatggcaattgctgcattaatcttaggtaccggcattcgggtgtctgaatgtgctggcgttgatttgagtgatttaaaccttaaggatgctgtactagatgtaactagaaaaggcggacaaaaagatagtgtaccaattgcagaatggacacttccttatatcaagcgatataaaggtattcgtaatgaacgctatcatgcagatagtaagcaagtggcattctttttaactcaatggcatggtcaaacgcggcgaattacaactaatgcaattgaaaaaatgatcaataagtattctgcagcttttggtcatccccttaccccacataagttacgtcatacggttgcttctgagctctatgaagtaactaaagatcaagtgcttgtagcacaacagctaggtcaaaaaggcacttcagccaccgatctatatactcatgttgatcagaaaaaacagcgtgcggctctcaatgagatctcaaaaaaaaatcacgattaatcaaattaaatgcaaaaacgagtttggctattcaattccaaactcgttttttattaatgtttcaatttcttgtaagcttttttggagccacgatctagatcacgattaaacttataatcttgccagtctttaacaaagagtaaatctaagttatatccttttgggtacaagtctttagctagtcgtcttaattgtaaacgtctgagtggtacttctacaaattcttttgtcacaaatatctttgctgcattttgggtaggaagatatttataaaagattccttcttcttttaaattggtagcatatacaatatcacctttatgaaattcttttttaacaaccaggttgcttttgtttttccgctggtgaacgaaacgtttttttaaagataaaggtaaattattgcccgctaatatggcttctgcttgatgcaaaacattttctggaatacctgattttttggcgatccatagtgctcgactattaccaatacttcctatctttaacttataagtaggttgcagattttttaagtcaaaatccattgcagctgtgataaaaccatcatgctgcttagcaaaatccttaatagagctgtagtgtgttgtggccatgattaaacagccacgtaaatacaactcttgtagaataccaatagcgagtgcgcttccttcatttggatctgtccctgtccctaattcatctaataatactaaactatggaattgagcatatttggtaatcatggcaatatctttcatttcggctgaaaaagtactcagagaattatctaggtcctggtgatcacctattaaagtaaaaacgtcatccattaatggaatatcacatggtttatcgcttggtaaaaacagacctagttcggtcattaaaatcatcaagccagtagttttaagcgcgacggttttaccaccagcatttggtcctgtaatcattagaacactattttcttgggttaattctaaggttaacggaacaggattaatgatcaagggatgccgcactgcacgtaaaacaagagaattttcacgattaattttaggcctaatacaattatatttttgtgcaaactttcccctagcaaaaatcatatctagtaaagtgattagttcaatgttacgcttaatatcatccttcacgtcgtatatttttgcagttaaagcacctaagattgctagttctagattacgtatttgtgcctttaaattggttatttgctgatttagacgaacaaccttagcaggttgaaagtagacggtttgtccaccattagaaacagccacaatagtccctgacaattgatttttgtagtttgctttaattggaatggtagcgtagccctctttttcaacgatcattgcgtctctaatcattttttgattaggtttactagtcaaaaaatgatttaatgcagttttgagttcagtaacagatttctttaagtcgcggcacatttttgctagttcacgatctgcctcatcgcgtacttgaccatgttcaatagtagtataaatagcatcttcaatgtctggcaatagcgtcatgtcttggacatatgcattgagtaatggtgctagctgctcatgtctggctaaaaagcgttgtagtaggcgatttactcgtaaaaattctgctactttttctagatcatcaggagttaagattagtcctttttcagctttagtaattaaatgctcgatatcctcagaactggcaaaaggaatgtgctgccgtaatttcaaaatcttcacggcttcttctgtttcattaagcagttgttctactttatgtaaattgctacttggttggacggaacttaattgttctttggcagcaatagtaattgcctgttgagctaagatatctttaacttgagtaaagtttaagttttgattattgttgatatttttcaatttgatgtaatttccttatgtttaatttaacgctgattgtaactaatggcttaataagtatgcttgcagacatatgcatttcctcgaatttctataatttgatttaaaaatgattgtaacataaaaagaacattaaaatatatactatagtaaaacagttattaaattaattcctatattttatgataaccatattactattgcctactatagcaattttgaaactgtcaaatcttttgtgtaaatagatctttctcgtaaattgattttttaattatttatttaatcaaagtaggattctaaggtgtcctgaacctgaccaaagcctttatgaattcgattgaaataacggtcattgtagctcattgcctgaatgccaataaaagcatcaagcgactgttcagttggaaactctgccttaggcttagctttgcgcttgatcacattgttaaatgattcaatcatgttagtcgaataaattgaagctctgatctgcttgggatagttataaaagaccagcagatctggttctatgtctttcaagcttctgataacatggctgtaaaccttgccccatttggtatagaagtcatgcaggacagctgtggcttcttctttgtttgtctgttgatgcacctgtttgaattcgttcatgatcttttcacgatcgtcgacgcgtactttagcgcagatattgcgcatgacatgaaccaaacagcgttgaaaatgagctttaggataagtcctggccaaggctgttttcatgccaacaacaccatcagaaagaaaaagctcaacttgctttaagcctcgggatttcatgttttgaagcatatctgtccagacttcaatgttctcgctaggtgcaatgcagtagtcaatgacctccttgtgcccattaggcttgatgccaatggcaatatagactgcttcacgctcaaatgtttctcggcgcaaaggaaggtatgtcgcatccaaatagacgcagaaaaacttgtcgcttagcttgcgtttgtggtaagcctcaacctttggaatcatctgcttggaaatatttgatacctgagctggactgtaatggctgccatacatcttttcaattagatcggctatttccctggtggtcacgcccttggagtaaagcttgataatcatgctttccaagatatccgagtgctgcttgtagccaggcagcgtgtgctgatgaaattgaccgttgcgatcccgaggcacttgcacttcaattgggccaaattgcgtatcaactttgcggaaataagcaccatttctagagttgccagtattccagccatttctggcatagggatcatagcccagaaaggcagtcaattcagcttctaacaagttattaacagcctgttgtagctctttgcgcaataaatcatttattttgtctggattgaatagagcttgagcaaaatctttggtaaaatcattcatgaaggagttcttctttctgtatgtgtttttttgttcaaaccaatcatacgagaaaggaactcctttttctaatgtttaaagaaataaatttaaggaatcattcatccttacacaaactattttacagtctcgcaattttactataacattcagcactagtatctcaactgtaatttttaattacaaatctattatcgtaaaaagggtaaacaaaaaagaccatagtttgtactatggtctatggctatttgttcttattttaattcgagcttatcaatatcaaccatccatgcaattgcaattgatttctctcctaagtgtgtagcgattactggactaaattcagctacatcaactggcttatctggaaagttttcattaacaaattgcttaatttgctccgcttgctttaaatcatttgagtgaaatacaaacaagcgtagcttatctttataaggcaaatttgctgtcttctctaaagttaatttttctaccttagaaacagcacgctttaatgatctgatcttatcaaaagcaacgatttttccttcatcattaaaagttaacaaaggcttgatttgaagcattgtcccaataaaagcaccggcattgcttaaacgaccaccacgacttaagtttttaagatcatctactacaaagaattcatcaattgtcttacgtatctcatctaacttctttaagatagcctctggttccataccattttttatcattcttgcggcagctaacaccaagtagccttgcaatctaactgtcatcttagaatcgtatggatataaattatattcaggattgttatgtgccatatttaccatattttgataaaagcctgagataccactggacaaagtgatagcgataatagcttcatagccttctccgtgtaatttattacataattctatcatttgccccatgctgggctgtgaagttttaggaaaagcagcaccttgtctctccatctcaaaaagctgggtggaagtgatactaacgccttctgaatattccttatcacctacgatgacaggaataggaactacattaatatcattatttttaacttcttgataagttaagacactagtactgtcagtaactaatgcaattttcaatttattaacccttcccatatctaatttagcatagaaaaattatagcataaaaggcacctatcacgcaccctattccattttttctagggtcatagaagtatcagcgacttgatttaattgcttaataaataaattagcagcatctctgtcaaaatagacaaataataaattctcaatcttagtcagagttttttttagttctttagctttagtcacgccagcttcacttagattcacaatcttgcttgaatctttttccgatctagtgatattaataaagctcatagtcttcttttgctgcaattgacgacttaaggttgataatgaaatattaagcgcttctgccagcttccccatcgctaatgcttgatttttgttttcatcaaaaaatagcaaaattcgagtttgtgaaatatttaagccgcatttgtgatttatttcttttttcacttgatctgcgatcgtactaaaaaataatacatccattcgtatagtcctttttctccaatgtagattactatatacttgtattttatcatttaatatggcatttgataataccaaaaggctaatttatcagtaatattgtataatacaatgcactttttatgttgtaatatacaacttaatgatatagccgacctcgcgtgaaacatttactactgtattgcaggtttcaattatgattagctataacttataaatataatcattttagaatctgactaaaaattgatataatattacacgaactttgaggtgatatttatggcatttgatggattatttatccatagtttattaaaagacttagtccctactctggtaggtggtcgcttatcaaaaatttatcaaccatttgatcaagatctagtcttaatttttagaaaagatagaaagaattatcaatttttaatttcggccaatgcacaatatccaagaatgtatttgactaaacaaaacattgcaaatcctgataaagcacctatttttgtcatggttttaagaaaatacttagaaggttcagttttgcaatcgattgagcaagttggcttaggtcgaattgtcaactttcattttagtaatcgaaatgaacttggtgatcaagtcaagctcatgctttctgtagaattaatgggacgtcatagtaatgtcatcctttataatcaagaagacaatcacattattgatttacttaagcgaattaatcctgatgaaaatagagcgcgtgttttactgccaaaagcaaaatatgagttgcccccactaaaaccaggattaaatgggttgactctatcagaaagtgaatttaaacaattaagtagtgaaaaccagcctaatgaaattgctcaaaaaatggatggcttagataaagatgatcgaactgaattattaggctatcttgaagacgattacacttattcatcttttaagaccttttttaatcagtttgacaatccgcgtgcttttattttaaaaacacctagaaataagcgtaagattttttgttatttgccctatcatttagatttagagaaagaaagctctaatccagatctgaatgctggcttagatgaattttatgaatatcaggcaacacgtgattgggttaagcagcgtgcaggacaagttgaacgtgtagttaagaatgagcaaaataaactaactaagaaagttaaaaaacttgagaagcaattagatcttgctgaaaattcagagggctatagaattaaaggcgaaattttaaatgcaaatttggctcaagtaaaacctggaatgactaaagtttcattacctaactattacgaaaataatgctccattagagattaaattagatcctgctctctcccctgctcgtaatgcgcaaaagtattttactcgttacaaaaagttacgtgattctattaagcacattaatgaacagcttcgtattgctaaggatgatattcgttactttgattcaattcaaacagctattgacaatgcggatccacaggatattgatcaaattacagatgaattgattaatcaaggatatttacgtaaacaaaagaaaaataagcgtaggaagaaaatcattgaacgcaatttaaatgaatttaaactttcatctggtaaacacgtattggttggtaaaaacaactatcaaaacgattggcttactcttaaaaaagctaataaatctgattactggtttcatgttaagaatatgccaggctcacatgtgatcttacgcgatgatcagcctactgatcaagatattaaagaagcggctgagattgcagcttacttttctaaggctaaaaattccgctcacgtacaagttgattatgtgcaagacaagcgtgtgaaaaagcctaatggtgctaaaccaggatttgtaatctacactggacaaaattcaattgaagtaactcctgaagaaaaggaaattatgaataaaaaaattgaaaaataaaaatcatcgaactagttagttcaatgattctcataaatgcaaagtcatatcgactttgcattttgttttgcttattaaataggttgagtagttaaagccaatgattctagaacgtctaaaatcaattccgctgtttcgatacttgagaaaacaggaatatgtgtattcagcgcttcatctctgatgcgcgatgcatcttcgctagctgcatcagacaaattagtaatattaacaaccatgacgatcttatgttgacgaattttatctagtagatttctagggtctttatgaaccttctccactactccagtagtaatcccagcttccgcaaacatattagctgttccttcggtcgcaattaatttgaaacccaagcgatcaaatcggcgagctagttgggtcacgcgattcttgtcttcatctctgactgaaataaagattgttccataacttggaatatgtaaatcacttgcttcatatcctttgtataaagccttagctagttgagtatctcgacccattacagaacctgaggatttcatatttgaatcgaaagtattaccacttgaataattaagaaatgaaaatactggcattttaatatgaataaaatcgctgttttgccatagaccattaggatatcctagctctgctaaatttttgccaattaaagcttctgtagtacaagtagtgatatccttatctagtgattttgataaaaatgctacattatgacctgcatatggtttaatttgcaatagatataggtcattatcaacgaataaatagtgcagattaaaaataccttttgttttcagctgcttaattaatttaattgactcttgctcaatctttttttgctgctcttcggttaaattttgcggctgaatcactgcaattgaatcagaggcatgcgaacctgtttgctctagatgttcaattataccgggcaaagttacattggtaccatcagagatagccgttacctcatatttgtgtccctcaataaagcgagaaatagttatttgatcaagttgattttttgctaaatatttctctattgcaggaacatcataaacaactgcagatttttgcttgttttctttattcataccaccaattaaaagtggaaaaccatatttagaagcaaaagcgaaaacctggtctgtatcagttgttttatttaatgccgggacccgctttaaggtagtagattgttgatcaagcaaagtagtaatcttatcccgcggatcgtcgtttgccttttgcccaataacgtgcaaaccacatttttccaactctttactcaatgcactgattcttttgccagaaaattgaactaatacatcagaaatattttctcttttagcaacagttagaatattttcaactgtaatggaatcaaaataaactcggtcaatattcttataccttgatgaaatcgattcgtcattatttgatagaagcacagtaacatagccatacttatgtaaagtatcggccgcgtgagcaatcatatagtcaaactcgctagtaaccgaaacttgaagcggcaacatgcccaaaatcaagatctttttttcagcatttaaagcttgtgcttcattttgaacatcatatgcactgtagtaagcacaaacattaggtttatatatacctgctgagccgtcgatcttcaaatatgatggctgcaagtcaattttattaatcaaagagcgaacttcagtaactgatttttgtaaaatcttagctaataatgggttaaagaatccatagactttagcttcttgcagcaaatcacgcgaaggctgctccttctcttgtaataactttttgccaagtcttacaatgtgaagcaatttctgataataaaccggatgcaaatgtgttactttttgtaattcagaatatggaatatcttgatcaattgcggctaataatttaactaaatgcaattcatcaggatgtgccaaatcattcaaaatatctgcagtggatttttctttttcttttataaaagcatgccaacccaattctaaattaatagttgcatctaagcctttcagaaaagcagtttcaaaattacggcctacacccattgcttctccacttgcttgcatgcgacttcctagcaaatagtggttatagccggattcagcaaatgaccaatatggcattttaattgctactgcatctaaggtgggttcaattgaggcattaagtccagatagaggatcggtaatctcattcagtcgataaccgatagcaactttgctaacgacatatcccacatcatacattccaattctttgagcccaaacagaacttcgcgtcaaacgcggacgaatcgtcaaaagcttagatcgaatttgagttccatggtgtttaatcgcaaaatgaaaactagcaaatccaatgagatcaagattagacatgatttttctaacggttattcttaactcttgaatatgatcattgtttagggttaatgatggcatcacaactgcagagtcacctgaattaatacctacagcttcaatagatcccgcaaaattgataaaagctaaattgccatccttatcacggattacgtcaacaattacttcttcccaactagataagtcttcagttaagcgataattcttccatgtaaaattatcattttgcttttcttctttaaagtaactgattaaatcggtaggatttgcaaattgcaaatgttcgttgtgtacaaaacggttgtacttagtaactaatacgggaaaagtgactttgtcgttaatgctttctagcgcattatctaaattatcctgaatactctgattaagttcccaagattgcccggtatcaatatgtagcttagtaagcaactctgtctttttctgttgattccccatttgtagagcacgcgaattcaatgttagtaactgaattcccatttgttctaaaacgccatcttgtaataacttatgtgcaacctttaaaccattagttgaaccataagctgtcataattgcatctggctcttccatccgtagaattcttttcaggaagtcgagagtcatcggttcaagatagactgttacaccaagttttttatcagttgaaattgtagctggattaggattgactagcacaacttgaatgccttcttctgtcaaagcatcaattgcttctgttgccataagatccatttctgctacactaccgattaaagtagggcctgatccgataattaaaactttatctaaatcgttttctaatggcatataactaccccatcatctgtaaaaaataatcaaaaatttcatctgcatcattagtgcctggtgctccttcaggattaaaagcagtggcgatcaatttgtccttactgttccagaagcccgccatcagttcactgtgtagatcaaagtattcacgattcatattcatcttcacactatcaggcaacactagttggtcaatattcatcgctgtttgccagatagcattactattttgttcaatcactggataattaataccatcaaattcttgtggtaattgaaccagttcaaagccgagataatcgctcaaagttaaaaaacctaatccgattcctaaaattggatacttaccataaaaatgatctaaaactggcgttagctgattaattacttcttctggttttcctggcccatttgaaataatcattccttcaggacgtaagttttcaatatcaatcggactggcactgtatggtaaaactgtcgtatttacttttcgtaaagataaagcacgcagcattgagtgctttagcccaagatctagcacagctacagttcgtccaacattaggggatgcatatgcattcttagttgaaacagtcgcagatttatttttaggtaaaactagtgctttaatctgatcaaaggcatgctcgtcattagtatccatgatcgaagccttaattgtaccttcttccattaagcgatgaactaaagcacgagtgtcaactttgaaaattgcagggatgttcttttctttcaaaaaagaacttaaatcttcaaaattttcactatctgaaatatttaatgcaatatcgttagcaataatccctttaactacgggatcaatactttcataatcaatggcattaataccgttattaccaatcattggtgaagtaaagactaaaattttaccagcattagtaggatctgttaatgcttcttggtagccaaaattagccgtttgaattgctaattcaccggttgaaataatactggcaccaattccttcacctggaaatgaactgccatcttctaaaatcaaataccgtttcatattatcacttacttgtttgttctagttgagccaacgtttcttgaaaaatttgtggtggttctacactaaactctagccattcgccagtacttggatgtttaaatcctaatactttagcatgaaaaaattgaccatgacctttcaaggttttacgtggaccgtataatgggtctcctgcaaccggatgtccaatatagtcaagatgaactctaatttgatgggttcttccagtttcaagctgacactcaattaagctataatccttgaactgctcaagcaccttgaagtgagtaatagcttttttgcctgtttcaactaccgccattttcttgcggtcatatggattgcgaccaattggtgcatcaattaccccattttcttccgcaaaattaccatgaacaattgcccaataaagacgtttgttagtcttatgagccaattgatcttctaatgattcacgagccttggcggtcttagcgatcattaataaaccagatgtatctttatcaatccggtggacaattccaggacgaaatccttctggtgattgtgctaaggccttggtgtgatataacaacgcatttactaaagtatgatctggatgacctggtgcgggatgcactaccataccttgaggcttgttaactacaatgacatcatcgtcttcatacacgatatcaagtggaatattttcgggtataacatctaacggtttaaccgctggaatattaacttcgattttatctcccgcctgaatcttataagatactttttcgactttgccattaactaggatattttggtctttaaccagttctttaactctagttcgagatagatcaggaatttgttctgaaacaaacttatctaaacgtcccttttcgttttttacttcaagtgaatattctttagtcatgttgttcttccttaccttcaataaaaattaagtaaatgaacacaaggattactccaacagtaattgcggaatccgcaatattaaaaatgttgaagtgaacaaaatcaagctgaagcatatcaactacatattttaaatgcaaacgatcaataaaattaccaacaattccacctaagatgagggctaaacccacatcaaacaaggtattcttgtactttttgttaaaaagaaaatacaagcaaacactaatggcaataatactgataatgtaaaaaagccacatttgaccagttaaaatgttccaggccgcaccattattttgcaaataattaaaggaaagaagcccaggaataatctggtgtacttctcccacagcataatgggcaacaatataattcttaagtccttgatcggcaagaaccacaactaatgaaataattaaatataaaaacttcatatctttttagaataatccgctaattttaccattgttatcaacatcgatatctagggccgcaggatgcttaggcaaacctggcatatctagcacatgacctgtggtaaccacgataaaatgcgcaccattttttaaactaatccctttcacatgaagcttaaagtcagttggagcacccaattcgttcttgttgtcgctaaatgaatattgggtcttggcaataattactggtaattgggccttacctaactttcttaattccgcaatttgcttttcagccttgtcactatattcaactccagctgcatgataaatcttggtagcgactttctcaatcttgtctttaacatcgtcatcatctgcataagttggagttaaatctgccttgccagagttagccaaatcaacaacagcttgagcggcttctacaccacccttagaaccttcgccatgataagtaactacttcagcattaataccttgttcttcaattaattgtttaagcaaagcaagttcttggtcagtatctgaagcaaaacgattgattaacacgatgaccggcacattgtatgaacgcatgttgttcatatgacgctcgaggtttttaaaaccttcttttaaagcatctaggttttcttcatctaagtgatcagttgagcctaaagcttgatacttcaatgcacgaacagttgctacaactactgcagcatcgggcgtcttgtccagatgtcttgagacaaagtccatgaacttttgcccaccaagatcactaccaaagccggcctcagttaatacatagtcgcttaaatgcaaagccaagtttgtcgcaatgacggaattggctccatgcgcgatattagcaaaaggccccccgtgcactaatgctggtgtgtgttccaaggtctgtactaagttaggcttcagcgcattagacaatagtgcagcaattgcaccttggaatcctaactgtttaacataaaccggttcatcatccttagtgtaaccaactagcatgtcaccgattctactctttaaatcgttaatatcagttgccaagcagagaatcgccatcaattcgttggctacagtaatggcaaaactagcttgatgttcaacaccattaaacttggagccttgaccaaccgtgatttttcttaaagcacggtcattaacatcaagcccacgcttaagtaaaattcggtcaggatcaagatttaggctattgtcttggtagatgtagttatcaactaaagctgcaagtgtgtcaattgcggcagttaaagcatgcatatctcctgtgaagtgtaggttgatatcttccatagggatgatttgtgctttcccaccacctgtagcaccgccttttaatccaaaaacaggtcccatcgaaggttcacgcaaggcgatcatcgtattctggtgcaactgattgtgaattgcatcccccaagccaattgtaatcgttgacttaccttccccagcgggagtaggagaaattgacgttactaatactaatttacctaactttttactagcacgagtcctgttaatggcttgccaagtaatcttagccttatcatgaccataaggttctaagtcttcctctttcaagcctaccttagcggctatttcattaataggtaattctttggtttcttgtgcgatttcaatatctgatttcattattgcttattcttctttctagacatcattaaaacagaatagctttggtaatcactttttagttgataaacttgaaaattacgccaacttgaaagcaaagtcatttgattgatttttacttttgaacgatatggcaacttgagtaatattttgtctccacccttttgcaagtaagaaaaggaccaagtataaactgctaaaagtaagaaaatgataccaactactattccaggtatactaattgctttgttcccttcatagcccaaaataaaggcgataaatagaacgattaagagccaagaataatagataattcctgcaactcctagaaacatgaaatgccgtttagattttagaatttagatcacaccctatttatttaatcatgtctattgtatcaaagatttaatcaaaataagagggttgaacttacagcaattaaatataagtccaatcctctatcacatttatttactttactactgctatttcgtctctaacctttatattgcttgaatcgatgccaggtttttgaccgtgaagattaaagtctaaatcaactgtcggttgaaacagtaaatgtactcattgaaagctcagtagccttggtatttttcgctgcttgaccccatgctctcaatactgcttcgggaattcctttagcattagtcaaatttacgttacttaatttattaccaacatggccgaaggaatcaccattatcaccaatattattaccaaagtttacattgcttaggtcaatattggataaattactatcgccatcgaacaaactagcaatcgatttagcattagataaattccaaccactaatatttacagattcaagacttttatcatgaccaaatgttgcataaatattagtaacacgacttgtatcccaaccacttaagttaatactttttacatttggaatactagaaaataaaagtttcagattagttacattggaattcaaagttgtagtagttaaatcaatggcagttgcatttggttctttattgcttgaacgtatccattaactatttctctagtaatgttgcgggcatttgttagatcaacatcagttaaggcattattatgtgcaaaaaagttccaagcgtttaccacatttttgtatacagtatcgcttagatcaactttcacaagcttttcagcgccactaaacatttgtgacacgtcactgaattgacccatattccagccagcgatgtttacattttcaagattcttgtcattttgaaacatagatctaattgcagtggcttcactaacatctaaatgacttagatcagcagactttaaagtgtcactgttcattaaggctgcggtcatgtcacccttagcataaactttgttcttatctccctcactgtcaatagtaatgttaactgcacctgcatctttgatagtttctaataagtctttagtgatatagactttatcatcagtagttattgttcctgcattgataaaatcttgggtattagggatgtaaatatttttattaccagtacccttatatttagttaaagtgtattgatgagaattttgatctaaacttccatcccaatctgcagtgttgtactgactattttgagtggtgttagcttgtgtcttactagttgaagctactgtagtagcttgcttattggtagaagtcgtactctcctgcttgttttcattagtagctatcttgttcttactttcaattgatgatccgacatttgagttatcatcgattgaattgttcttagtagttaaatcagtatttgaaagatcaactttgttagtcgattttgtcttcacaatactagtagtgtcttcagttttattggcaccatttgtatctacattattagaagttttagttgtggaagcaacttgctctgtagtagtttggtcctttataacactggtagtagcactatcagatgaatttgcatcaacactatcagcatgtactgtttgactagagtaactcataaaagtcaatccaattagtacagaaactgcaccgattgttattttacgaattgaaaaacgttgtttaatagaatcaatattattgtttctaaggaaatatcattaataaaaaatgaccgagaaattaatctcagtcatcttcttatcaataagggtatctcatttctactaccctactcgactagtaccattagcataattcaaagttacgccatcttgcacgttgaaaatgtaaatattgaaatgaactgcatttgagttaaccgactgcccttccatttcaactccgcgagccaatagttcattgccacgaaagaccggtgtcacacggtagcggacgtagttgcttcgactttcttttacataatcagcaacctgatcctcatagcgcaacatatcaggatcatttagctgccttgtacctgtcatcaaatttttaatgttgttgttctgtcctgttagctgataaccaatcaaatggcagcgattatagagccagccgccagcaactcgtttattatgccaaccagtaggatcaacatgtagtggttcgcgtctagcgcttggcatcagcgactgaataagcaatgcgtttgcggcagttacccgattcaaaccatcgaggttaccatattcttgccatgctccgcgattagtactcaagtcactcttagaaaaactaggatcgttgttatttactgtaatgatgtttttcccagaatagttaagacttgccagttttgcggcactaacagattcaatattgtgtttgccagtgtacttcttgagttctttgcgcagtttagcaatctttttgtctaggctaacaattttcttttcagtttgcttgttttcctgcgcaatttgcttggtctttttctcagcactgtggtcatatttgatgatagttttaaccttggcgatgacattttgacttagactaggattagtaatcgcaccatagccgccaaacaaaaacaacgtacttgaaacaagtgtaataattttcttcttattcatcacctttttgcctttctgtaaccagcattgattgcatcctgctcactattgaagtaaaccgcatttgcggaattcatatgatagcctgcttgtcctggtacgtgataaatcttagaattgacgttaccgacaattttgccagtttctgctgtatctaggtctccatgattgccgccaccattagaatgatgtgttgcagttgaacgactagattgagctgactcgttttgccgtgattgttttgctatttgagtagcttttttagcagctgcttttgcctgttctttttgctccttctcttgttcttcttttttatccttagcatctttaagttcggagcttagcttatcgtactcatccttcttcttcttttcttcggctaattcaaaagtctgctcttctaagacttcttcatcagtagtgcttttctcttgaaacttcttctggtgctcaatatatgctggttgagaatgtactaattcacgagtgatgtttagaccatatttatttaatagcagtttttcagtatcactaattttataaatacttcttcttggtgagattagtaaaccagctaattttaaatcactaagcgcccaagctactcgactaattgctactaaatcatgatatttagaaggatatcttaaattaacaagttcttcaggtaaattaatctctgtgacaacagcttatcaagctctctacctacccattcttctttagtactcgctacctctagcatgggacctaaaaatgcatcccaagttggcatcccattttcactatgttttaaagttttgtagtcaatcattttttatctttatcaacttaggcgtattactgtaatgtgttcgcccagaagcttttatattaagattgactggttgcatcaaatttacgctagtcaatattgcctctcctgactttaaactcgacaactgagctaatttgtctttatttaggaaattattgattgctttaatttcatattcaccagttaaccgatgcattaaaagtgttcctatctgatttaatactatagttggcacatctttggggctttgagtagttaaaaatagaaatattccattttttcttccttctcgtgctaacgtagccagaggagaaataaaatcatcttgagcatctttttctaaagcatatctgtgaacttcatcaacaaataataaagttggatgttttgtcatatcatgatttaataagaaattacttatatagtctacaattacttgtcctaatccaattgaaaatttggaatcatttaaacgtatatataatgatatgtcattaccttgaaattctaacatttctttattaaggtctttgagtatctttttacctttatctgtttctccaaaatccttatcttgagttttactatctacgtttaaaaataactcttttagattatacgtcttaatcaaatattttactttacgtattagccaagaattagctccatatgtaaaataatcaaactggtaggttccttgttttatacctttattccaactaagttttaaagaatctttctcaatttgtttatctaaattgtttatatcaaatgattcattaaaaactttatcagattcccactgaatctgaagatgcttgtactgttcttgatttgccccttcacagtcaagaatatcatttcttataaatctattctctgcctcggttaaatttaccttatttaaatgctttttatagtattgaacaaattttaatttttttattgcctctaaaagctcaatcacttgggaattatcatttggcctaaataaagaaatccattgttcatcagtcaaattagcagtattcaagaataaatttttccctattgtttttaaattaacctcattttttgaaaatgcatctttatattcaccagttggatctataatcaaaaattttccttttagcttttgatatttatctaaaatcgctaatgcactagttgatttaccagaattcgttgctcctacaatcataaaatggtgattaaataatccatcaacactaattttgaatggaatagctttcttttcatttaaattaaagcttgaaaattcaatttgattatcccttttattaatttctaatgaatttatatatttcttaatagcttcatcattacagatatatgccttatcaccaattcctactgttagatctccgggcaatacaaacgtatttttatcgtacattgccattagtttaatttcaatatttgggtaaataatatcatcattattttctattactgccttatgaatattatcagtattattaatcctagaacttattactttccctaagaaaattggagactgtaaaatagtttgtgtaaggatgaatgattccttaaatttatttctttaaacattagaaaaaggagttcctttctcgtatgattggtttgaacaaaaaaacacatacagaaagaagaactccttcatgaatgattttaccaaagattttgctcaagctctattcaatccagacaaaataaatgatttattgcgcaaagagctacaacaggctgttaataacttgttagaagctgaattgactgcctttctgggctatgatccctatgccagaaatggctgaaatactggcaactctagaaatggtgcttatttccgcaaagttgatacgcaatttggcccaattgaagtgcaagtgcctcgggatcgcaacggtcaatttcatcagcacacgctgcctgactacaagcagcactcggatatcttggaaagcatgattatcaagctttactccaagggcgtgaccaccagggaaatagccgatctaattgaaaagatgtatggcagccattacagtccagctcaggtatcaaatatttccaagcagatgattccaaaggttgaggcttaccacaaacgcaagctaagcgacaagtttttctgcgtctatttggatgcgacataccttcctttgcgccgagaaacatttgagcgtgaagcagtctatattgccattggcatcaagcctaatgggcacaaggaggtcattgactactgcattgcacctagcgagaacattgaagtctggacagatatgcttcaaaacatgaaatcccgaggcttaaagcaagttgagctttttctttctgatggtgttgttggcatgaaaacagccttggccaggacttatcctaaagctcattttcaacgctgtttggttcatgtcatgcgcaatatctgcgctaaagtacgcgtcgacgatcgtgaaaagatcatgaacgaattcaaacaggtgcatcaacagacaaacaaagaagaagccacagctgtcctgcatgacttctataccaaatggggcaaggtttacagccatgttatcagaagcttgaaagacatagaaccagatctgctggtcttttataactatcccaagcagatcagagcttcaatttattcgactaacatgattgaatcatttaacaatgtgatcaagcgcaaagctaagcctaaggcagagtttccaactgaacagtcgcttgatgcttttattggcattcaggcaatgagctacaatgaccgttatttcaatcgaattcataaaggctttggtcaggttcaggacaccttagaatcctactttgattaaataaataattaaaaaatcaatttacgagaaagaactatttacacaaaagatttgacagtttcgaaaattgtgccattactatcaatcaaaacatgataattaatagtattagggcgtaaaacatcactttgattgaagcgatacttcaataaactcatgttttctatttgaatattagcaaaaatagaagatacagtagatattttacctaaatagtattcacatttgtctacatgcaaatttttgtctgaactatcaaaaaagttatctatcaaactcatagttatcccacataataagataaatcataattataactacacattgttgctttaagaaaagcaatattatatcctcgatctctcaaatcatctaaatcactccagttgtcattaacatcttcttgttctgtttttttatcaaaattatgaatattataatcagtaatcaaacaatctaaacttgagttatgcttaattgcgtttataatcattctacttatgtgattatcaccaaaactaaaacccgaagtaactaataatgtattaggttggtgcaacttattttgaaatcgagacatgagatcaaaatagggttcctcatagctctgagcatatttattagaacttggaaaaatcatttttacatgattactgttatctctaatcgtactttttacctcttccacagtcgatttagtaactttattttctttttcaatccaattaatagacccatgaattttaagaagatctataacatgctttttatagataacttgtttagtattaatattgttaacttctttactcaaaacccactcatacatatcatcattgaattctttattatttccaaattcaaatccatcaaatattgtgaagttatctttttccagagatttttcaattgctaaatcataatttgtagtcgcaaccatcaatttactgctatccgaatgaattaaattaagcaactttaaaatcactttatcatgcttaaatggcattttagatgtactatcgaaattataatcaactgaatcaagtattgatagtaaaataaatctttttaatttttttgcttgtgataaacttggatttctgacttttttaccagacatctctgcgtcttgaatatataaatttaaatttgaaatatattcttctaatggaaaagaaaaccatgtactttcatcatcaaaattaactttttcaaatttttcttgttgatctttaggtaaaaagatcttagcatccttttcatctaaatattcttctaaattatttgttccataaagctgattgaaaatattccatgaaatatcttgcatagtctttccataatttgaattaatatttccattctcattagttacaactgaagctccggcaccaactaatagcacaacattactataatctttacttataaaacgcaaaacagcccttttgagaaacttatgaagttgcttttctaaaaacacaaaatcatgatcattatcatcatctggatttattttatctctataaaatttacttagtgctttctttttatcttgtttattatatttatcaggtaacgataactctatatctatttctttatctctgtacaactgcatacttaatctcctcgtattatataaattcatctcttaaaagttaattctaatatataaacaaattgtcaattttatcaacaattctattctgctccgctaatggtggaagaggtaatttcaaattaattaatttactcaaatatattcctttttgggttgtccctttcgcattagcaaaaatttgagttttaaacattgctgaaattaaaacataataaagaaacttacttaaaatattactactaataaccgcaacacttctttgagctgtaaaaagtttatcagtatcaacaactgcagcattacctaacgagcctacaatagtgagtaatacatctccctttcggatgtttgttcttttatcctcttttaaaaattgatcttcagaaacaaatctatttgataaagaaaaatctatttttccttttttaatgtttattgcagagataacttgttttccttcatgtgaattcggtgggggattatgcgtaccatcagtaatcctttttgcaatattccccaatctaacccattcccaactatcaggaatatcaaacggcttttcctcatcagtgatcggaggcaacggcttgctcttcttgatctccttttccttgatcatcttccgcttctcagccttaatcttctctagcaaaacactagctggttcatcatggggatcttgctcgactaattttccacgcattgccaaatccagcaccttcgacttcagcaaagtctgaagttttgcgtattgttgagtagaagattcgactttgcgaagcaaagcgaatagctgcgctattttagcagcgattcgactttgctcttcaagtggtggaagtggaacaagagtttctttcaacttttttgaattaattgttggtacagcagatccttttacaaagtcttttatgtccaagcttaaaaacagatagaatatgaacttgtgatttaagtcattgtatggtattaatcccccagtattaagatcaaccaatgaatcttgagacaaaattcttttttttgcggttaatatagctccaccgtttttaggaaaaataattgtatttttaggcattacttgtcggctatatttttctccaacccaatttttcacgttttccatatataagttattattattcatatctttaaccttaaagtatggataaatattatcactacttgtgtcttctttcttgggagtttttccattttttagtaaacctacatcccccaatctaacccattcccaactatcaggaatatcaaaaggcttctcatcatcagtaatcggagcaagcggcttacttttcttaattttcttttccttaatcaactgctctttttcagctttaatcttctcaagcaatacactagctggttcatcattaggatcttgtggcaccagctttccgtgcatggccaaatccaagattttttctcttaaagcctgtgcatcaaaatctaaagtattagtcttcatcgtcaattccttctaacgccttattaagttccgcaattgcatccctaattgccttagacttgtcattcatctcatctaagatttctttcaacgaacggttatcgtgctcttcttcatcattcatccaagaaatatcaaggctagtattaggacgcttcaaaatttcatcaatcgtaaacttgcgccatctaccgttagaattcttctctttatcccaagtttcttttctctttgagcgatcgtcaacgcagaatagtttttcaaattccgcaaaatccttgtcacttaatggattacgcttaccaaatgaccgcatctgatgacgcatatcataaatccaagtttccttggtattatccttgtcactttcaccgcgagtaaagaataatacattggtctgcacaccttgagcgtagaaaatcccagtaggcaatctcaagatagtgtgcaagttgcacttgttgagcaagtcttttctaattgcttcgccaacaccatcggcaaacaatacattatctggcacaactacggctgctctagctttaccattgtgtttaagtgaattgtagataatctgcaggaagttcaattgtttattactagtcttataagttaggtcgtcacgacttacactgtcgtcactacccttcttggtaccaaatggcggattagttaaaactacatcaaaatctttcatccatttaccatttgaagataatgaatcccctagttccaatcgtccatccatgccatgaagatactcattcatcatggctaaacggtgcgtggtttcaactaattccataccagaaaaagcttcttttacttgaaattcttctttatctgcggacaaggttgaataatcatctgtttgatcttttaaatatctgtcagctgctaccataaagccaaaagtaccagcagcagggtcattacagcgatctccaattttaggctgagtcattctaaccatcatgttaatcaacacacgtggggtaaaatactgacctgctccagatttgacttcgctggcgtttttctccattagaccttcatacaaatcaccaaggccttcgtcacgagctgaccaccaatcaagtgcgtcaatatcttttattattttttccaggtcagcaggtttgtgaattgaagtagaagcatcagcgtaaattgaattgattcttggactattaaccacttcaggattacctaaatcaagtaataattggcgataaaagttacttaactctagtccttcctttgaaacaagattatcccattgatatttttgggggatatcatcctgttcaccttgttccttactcatttttaagaataagatataagttaattcagtaatgtaatcttggtaactgacaccatcatcacgcaaaatattacattcattccataacttttgaacgatttcttgattgttcacttaattttgctcctttaaaaattgtctcttttgaagatttccggtagatatatttgaatattagtaaatggatcatcattaatccagtcactctttttccgatacaacttattggcgtgatctactgcatcttgcactttatcaaaaatatattctcgataactattacctttaaagcgactataatcttgattaaaataggcagatctagacagtttctgtactagctcttttctagtataagaacgagtgacactttcaaaatgcattaaaatccaaatttcaaagtctattgaagaaaacataatagtaatatcattttttcgagcaagtttagcgcatttccttaattcatctttagaatgctcatctctatcgaaaacaacataagttttatctaaatgattatatttgccaaacttaactgctttttctactagacttttaccagacaaatctgcagcaactattttaactttaatatttgctaaacgatatttctgcttaagcatagtaaaatattgtttttcagattcaccttcacacagaattccaataattggattagacttagtcttatttcttattcttcccatgctcatccccatatttttcatgaatcatttgcaatacatctagcaaaccatctacatctattacaggaactgcaccgaatcggccttgtaagtatctcttagcaaacgaaatatcatgtcgacctttattacgtgcatcttcaaagtcaaagattgatttcaaatcactaattccgtgaaaatccttgtctaataaataaatttgatcaattcttaaatcgctgtctaatagctgaatatcatgagtagtgataataaactgattcaaattttctgttgaattaaaaatacgaactaaagcagctgcaagttcaacatgcagtgaatcatcaaattcatcgattacaatcgtcttctcgttaccattcatttgagcaagcatcattgctaatactatataaaataaacgacgtgtaccaacagactcttgtgttaatggaagttccccagaattaataacttcattttgatgataaatcttgtgaaccgtatatagttctttagttgttttaggataatcaatatttaaattctctacaatcttttgtaattgtggattcaacggattagtaggtacttctctaattctaatatcagagatattaaaatccgcaaaacttaagaatgagatcatttcttttttgaggtattcatcttccatcaaatttaaaagttcgtcaggaatatttactggatagccgctgccaataaaaatcagatcattaacaaaccacttatagatagcaatacaatctgcatcattttcagattgtgctaaatataggaataaagaattatctctaagcttaggaatgctgtcttccaaaagcttgttagagacttgaatgtcatttccatttcgagaaaaaatttctttttccttgttaccactaattaaggttaatgcttcactggtaatgctctctcgattgtaactaaatgaatagtcataaattttgttttttaactcaagcttcacttcaaagtaagtatcttcaatcttggacttttcatcaaacaaaaaaggataataatttaacttatcagttacggcttgagttggacgtgttactattccttccattgtttgtaaagcttgaatcaattgagacttacctgaaccgtttggaccaaataacagtaagctttttaataatgatggatttttacttgagaaagtattagtttctttcaatttacgtagtctattgcctgtctctgcagacaaggtagtgcgctctctaaaagaagcataatttttaacagtgaactcgattaacatattgtattcctccgtgttaatttaagtttagcacacgcctttttttatcacaacttttcgtgattaaaagcaaaaaataccagtaatggcatttttaaacatataaattctcattcaacacgtaaataatctgatcagcattttctggaaagatcttcttaatttgcttataacccccgtgacgtttaaagaaatagttatcatcaaaggctttctcagcatttggccccaatacagtagatgaaattaattggttctcaattctcttcaaccatttcttttgaggaatagtccaatcagctaaaccataaactttttgcatggcattatgaattctaacatcatgatccaccaactcagatccagccgcagcttgtctaatgaagctaataatatcggcagtggtctgaacatggttaacgtttttccatgcactttgcaaatcattttctttaaagccattttgctctagcttaagtttaatatttttgagttcatcaaaagttaaatccttcggtctagtagctacaacttgtaaggctggaatagtattgacgttttccttaacgaatttattgaagttttcaatataatccgctggtttttgattgccatgcccataacctcgacttacattaattactttgtctactgcgtctgatattatttgcttgggtttgacaggtttgatgtgatctaactgctcaaacttaggccattgctttaaaaattgggacttatctaacttacttaattcacgggcccattgatcaaccgaattaatctcagctagatgttggaactcatcacgtttagtatcatccaaacgtttaatttttctctcaacggcaccagccatatctacttgatactgagcggaatcctcatttgtctcaaagaaatcatccttgtgatttaagaagtagtgaacattatgtcctggatttttaacaacaggcttcatgtttgtcactttattcattgcttcatagattccgacggcatcataaatcgtaaatttggatttattaatttcgggacaaagtctggttgcccgtcccaacatttgctcatagaggattcttgactgaactcttcttaagaagacaatactagtaatttgcggtacatcaattcccgtagttagtaaatctacagttactgcaatattggggttggtttcattcttaaagtttttaatttcttgattaggatgccgaattgaaccagtaattttttcgatagcatcgtcatctacaggattactcacttttttgaatgcttttttcaataagtcaacaaccatatcagcgtgttcatcagttgccgcaaagattaaagttttacctaaatttggatcatttggatcaagatatctttgagctaattcatcacaaactacttcattaaagctacgtgtgataactctcttattaaagtcttttacatcaaaattcatattatcaggtaatttttctttattgatagttttttcatcctgatcaaaaagactaacttcggcaccctttttaaaatgaatcccttcttgagacaattgagtttgaataattactggtgcatcatgatccactaaccagccatcgaggacagcttgttggtagctatacgaatacaccggtttgccaaaaatatcaatcgtttgtaaagctggcgtagcagtcattccaatagcagtcgcatcaaaataatcaactacacgtctatattgactaacataatcttcttgactatagaattgatattctttatcgctgagctctttatcttctgcataaccacggtgggcttcatcaacaataatgaaatcatattgaccaacggatggcttatcatcactgtcttcactgaaaaataggcgtttgatcatcccctgaaccgttgcaatttgaatttttgttgatatttcaggtgccttatcactcaattcctttaatccataaatggaagaaattgacatcgtacctattttattatctttaattgcattggcagtctgctttcccaatgaattacggtcaactaggtaaagaatacgtctagctctcttatgcttaagtagtctgtacatcaaagcaattgccgttctagttttaccagtacctgttgccatggcaagcagaatacgcttttttccatctttgatggcattttccatcgcttgaattgcagcaatttgatattcacgatgtgcaaaatcaggaaaatcttgatcatctaccaagtcttgatttgcttcttctttatttttagcagaaagcttcaacgataaatcttctggcttatgaaattcctctagagcatatgcgctttctttatgattacgtgcatcccagaaccaaataccagatttttcctgatattgtttaagatatggacgaccatttgcagtatagatgaatggaactttgtaatcacccatttcatttgaaactagacgataatctgatctaaacggtacctctttagaatattccttaggctgtgccatttgccctacaatatcttggtcccactttttggcctcaacaattccgtagaactccaaacctttgaataatgcataatctgctcgctgaccattaggtagaacccattcagcaattgccatattgtgacctttttgcggttcagttttctgcgtccaattgttcaatttttgtgaatctacttcccagcccgcatctcgcaattgttgatcaattaactgacgtgtttctgcttcagttaactcatgttttttagcaaattgaacgttaatctggcgtctgcgttcacgctcttcaggagaaattatgacttcctgcaccctattttgttgtaattgctttatcttttcttcgagagctttgattttatcttcttgagttttaattaaagctttttgatcttgtggctcaacataatctgcaactttatccagagaataaacttctaaaaaccatttccataccaaataagcactctgatcaatttcaagcgcaatctttttggtagcaataaaatgatcgtcatgcgttgccttgttccgtcttaacctgatcaaattaagagcattcaaaacagtaggtggatattcattcttagaatatgccattttttcaattcgttgtttttggtttaattcccaatcacctaaatcatccaaatgcatgatttctttagttaattgctcaccgaaagtaccaaaaactgtcaaactacttctaggatcagagtaaattaagctttcagcgctggaagccaattttgcgtattcttgataatctttttgtgaagtttcaaagttagacattgtttttcctctaatattaaagtaaatatagttttattctacctcgaagccccatttaataacaagtagtgtaggtacaaaaaaagaagcaccaacacagtgcttcttttaacataaactaaataatcaatcgaaccctacttcgccaaaacatattcaaatcccaacatattggtatagcgattactacctatcttaatgtaatcatagcctttgatcctcttggtgccataagtttggacataattctttgtcctggtattctttgacttgatttcggcaacttttttaccctgggcatttaccacaggtgttacagtttgcacagtgtagtaatgtttgaccacttttagcttagatgcttcgaaattaccatacttaacatatttatttacatcaattttgacatttttttgccctttaatagtcataattgcttgaattttgtaaggggtccccttcttcagtaactttttcgtctttatacctttagcagtataaacgtatgcattactttgcaatttctttttcttgccaacagtaatgccatcagtgattaatgggctaatatcgactttgcgctttctaatggtatctgaagaatagccaaaccaaaatggactcttcttggtaacatcccatactggacgagttgttggatattgccaattacgtttgctgttataaagttgaacgtcaagctcacctgtaacttgaggctggtaatagttgtagatcaggttcatcactttttgaacctcataagtagttaactgatcagttcgtctaacgagcaactttttaccatcaagtgctttagtcgtattagttaaaaacttgtcagcttgactaaccgcaacttcactggcatttgtctcaccaacaacagttttagcattttgcaaataagtcaagaactgtatctttttatcatagtcagctaatttatagcgatcagtcttttgaaccttttctgcagtggcaattgcagtagacaatgatgacttattagttgccaccttgctttgtgattctgcttcaccggctgtgttgattggcgtaagttttactccctcaacctttttgacattactagccaagatatagccttcattatctaacttattagttttagcattagcttcacctgttgtatggtagaaaagttcagctttcttttcacttggtacccaaagatagagtgcttcattaattttgtggttgctatacattgcagtttcttcaaccgtattggtatagaactgtttagatagctcttgacttgtcttttcaccgtcaacattgtacaaaagaatctttttatccaagacaactttggtagaatcggccaattcaagatctgaatgattctctaaagcttgtggcaaattcagatcatcttctgatacccaataattagtgcccttgatccggtagtatgaatagtgatcatgatcaaagtctgtcaattgttgtgggaattgtcccgcataatcaactgtgatcttttgtcctttcttcaattcaatattatttggatctgtaccccaacctgttgaattaacatactttgtaatggttgaagtattcttattgaccgttacggtaattggtgcatgagtagtaagacgatagccgtcaatgtaaccgatgttggccaccttgatataacgaccggaacctaaataatagtagtcttttccattaattatggtataaggaatgcgatacttacctttttgagcctcataataatactttgctttactactagtagttttccgcttaccagcatatttgactacgctaccctttttgacaaaaccaacttttttgccagacttattgtaaatattggcattaaaaattgccgttaaataagcagggccagatattggcgttacataatctgaagaaatataaacattcttgcgtaaaggatagtataactcaccagcactgtagtcgcctggatcaaccgtcttaaaaaatggttttccatagtatttaatcgtgctgcctttcttaggtgcagaaatatgatccaaataattgcccgagcgattgtacaacataatatgtgaatcaatgacttttaaggaaccagttgcattgcttttagtagctgcggcaactgatgtttgaacgtttgaagttagtggtgctgcggcaattggagacacagccaataacgcagtagaaattaagataagttttttattgattttcataatgaaccttcgatctaataaatgcagttaagatttgatcagttagtactcatatcatcattatagcagttatagttatttattccttgatattgagcctatcaaaaaagagatcgaaacccagtgtctcaatctctttcgattttattttgttttcttcttacgagtccataatccacttaaactcaagccagacagtaataaccctaaccatgaaagatcactatcttgcctaccggttgctggtaaaacagacttagaggccgatctcggcgtaatttgttctactgtatcgtttttcataatagaagtttccgttttacagcaactaatctcactaccacttaagcttcagtttatggctactttgctctacctgtaaaaatgaatcaacgtagcgcttaaaaccaggtaaatatttggcaatcaaatgatattctcgtgaattaacaatttctttcttttgggctgcagaataattactttcacctacaaaaaagttccaattcaattgatctataaattttatgaccacgttagcatcatttttatctgataaagcttgcgcaatctgatttagttgcttttcatccaaactaaaaaacaaatgcttcaaatattgcgaaaaatctgttggcactttttgcttttcttccgcagttaaccacgattccattttgaaggaatgcacctgatattgcatccccgcttcgtctaaatatagctgaccatattcctgcttagtcatacaaaaacaagctcctgctacctccgcaattggtcgattagcaaacggaccaataatattctgtgcgtgcatatggccagaaaagactgcttttacattatatttttgtaataaaccttgcagtgcaagtgcattatcaagaatatatccctgatagattactttattatggcgatacagattatgatgcataaagaatagcacttgttgctgcttttgctgcgcatcaattaattctttttcaatccagttcatttgagattctgaaattcgaccgttagtaatcagatgagtttgtgattcctgcttgccataaatatttgagtcagccaatattagtcgatactgcttattcagattaacgctataagccagtgaatcaggatcttcatgtaaagcataatgataagaatcagcaaagatctctttccaaatagctgggctaatttgcggggtgtaatcttcatgatcacctttaaacttgcgagcccagccgtcaaaaatatcatgatttcctggtaaaactaagaatgcaattttatttttagttaatggcttaaaaatattagctaaacgttctcctgatattttagcgccattaaaggttacatcaccagtaattatcactgcagtgggcttctcttggattactttacgtacaaacgcggtcaaagcaatctcctgataatctaagtctttacctgcactagtgttgcgcatatgctgaaaagcaagaccatcatcatgtaaactatctgcaattagatgtgtatctgataataaccaaagaattggcttctttttactagtaatcacaatttacctttttcaaaaatctattttcactttaactactcatcattataccaacaaaaaaggcatccctgctagggatgcctcattgcgataaaatattgaattaagcgtcgatttcttcgatcttaatgttaactacgaatgcttcaggagtatcagtgcctgaaacgatcttcttagcgtaatcgtcgccttcatgaatttcagcatgtcctaaaacacgaaatgccttatgagtaggaacatcagcgacaacaatagctgctactgaaccattcttcaagtttgcataagcagttgacttagtcttttcaagatattgaatagttgaagcatcaattgccttaagtgaagccttaggaccaacttgtggcacaccgttagcattcacagttgccatgtatggtaagtgtgagttaaaaaattcaatttgttcatcagtaagcttagtagtatctaattttttcataaaattcgacctttcttttcttaagttcattattaattataagatatttgctataaaatagctattattttgccttagcttaattgattcttacatttatcatacacaagatattgtatttaataaaatgtgtttttaattaaatttctcttgctactaatatttttattaagtaaacagtcgttgatatatcaatgcttataaatgctggcaaaaagtcaaggattgaattttattttttagccagtagtatattatcttgcattagttaataagtgatacaagatattgtgcttattaaaataaaaatatattttaaatttcatttttattaatgttatttttagtgaggagaattcgatgacaaagaaaggcttaacaaaatatttatcaattggtgcagtaactactgcagcattatttttagcagcttgttcaaatcaaaagagcactacatctgctaaaaatagtaagacagaaattactatgtggcacgcaatgaatggtgcacaacaaaaaactttgaaacaattgactaataaatttgaaaaagaaaatcctaacatcaaagttaagctagaaaatcaaggtaattaccctcagttacaagggaaaattacttctactcaacaaaatcctaataacttaccaacaatgactcaagcttatcctggttggctttatcaagctgcgcaaaataagatgttggtcaatttgactccatacattaataattcaacttatggttggggctcagtagccaaatctaatattcgtcctgaattaatgaagggtgcgcaaattaatggcgttcaatatggtattcccttcaacaaatctattgaagtcttgacttataacaagaccttacttaagaaatatggtttaaaggtacctaaaacaatggcagaacttaagtctgtttctaaagcaatttatgaaaagtccaaccataaaattgttggtgctggttttgataacttagccaactactatgttctaggtctcaagaatgaaggacaaacttttggtcgttcaatcaagttagattcggctgcctctaagaaaattattaacttctacgcagatggcgtacgcaatggctactttagaactgctggtagtgaacgttatctctccggtcctttttctaatgaaaaagtcgcaatgtacatcggtacttcagctggtgaaagctacactaagatgggtgtaggcaacaagtttacgtacggcgttgctcctcgtcccggtgaatacactatttctcaagggactgatctttatgtctttaaccatgcttcaaaagcacaaaaaaatgctgccatgaaatatatgaagtttttgactagcaaatctagccaattaacttgggctaatgagactggctatattcctgttaacgataatgtcttaaatagtaaggaatacttagacagcaagatgaaattgccaagtgtcttaaaggattcaatgaagcatctctacagtgttcctgtagctaagaattctgactctgcttataatggtatgaatcaaattatggaaaatattttaattgctgcaaataagcatcaaaatgttaatgctcaaattaaggctggtcaacaaaaattagatagcgcttggcgtcaataatgatattaaaaaagcatccctcttctctattttgattagggatgcttttttgcatttgcaagagttgaatttaatttaagcactcacatagagtgcgacgtgcaaagaacctacttttgactggggcaaatgtatttcatccaatcctaaatatttggcttcatcaactattatactatgtcaaaagtatataaagaagagttaacacataaaatacaaaacaaaatcagtgcgaaactccctcatttttatgttcacatagggttcgcactgatttttttcttaactcaaatctttcttagtaactgccaaatgtgccttatcattgataaagacccagattggcaaatctattcctgttgaatcagtcaaattatttacaatttcactgataaaaagctggaccattttcttaggcggttcagtaaagtctcttctttgcggcgtgtaccataaacctgtgattggctttttagtttgtcgatcgaaaatacaattcagggtttcatcatattgatcaaatgaggccttgtagactatatgtaatggatgatgtgccaagttctcgactaactgataacgcatatcgtccgcaatttttcctttactaatcatcattaaactggtaactggaccattttctttttcaaatttttgcaacttgccttgtttgattagcttcttttcaactgaaataaaactatcagaatcaactaacatcgtttttccatctcgtattatataaattaaatcagtgataatgattattcttttagtttgtttattcgatcatcagatgctagtctctaattgtcattgaccttggtcaattggtataggttgtttccttctgtagctttgactacttttttagtctgccgcccaagcagttttactaatgacttactcacatgctgtatcgattctggctattactgattcagagcagattcagtcgcagctttttagcttgaacctatgaatacttatattttgcgagattgtcttagaatctgtaattagggactaacatgtgatgatcgatctatgaccaaatatttgctagaaaggaggccattctcaatgaaactttttatcggaattgacgttagttcaaaagatcttcaagtcgctattactgactcagaaaattatcaaaaacctttacttaaccaatctttttctaatgacctgattggtgctaatgaggtcaaaaagataattcttcaacttgctaaacagaacagctatgacaaagtaattatcggcatggaagccacttcaatctatagctttcaccctgcttatttctttgccaatgacgaagatttacaaaaaattaatcttgaaactgatgtcattaatcctaaaaacactaaacgatttcatgacgtttacgaagaaaataagaatgatcctactgatgcctattacatcactgaatacttacgctttggtaaataccatgtcactattgctcggcaagaggaatacttagctttacagcgtttaactagagctagatatgaaatcacatcttcgctcactagagctaagcagcacttcattgaaactctttattatcgtgtaaacaaactagttaccgttgacaaagacaatattaaaacttctatctttggcgcaacgatgctgtcaattgttactgatagtaaaaccatcgatgaaatcgctgaaatgccaatcgaggatctaattgactaccttcaaaccaaaggacgtggccgcttctctgatccagagactttagctaaagcgatcagaaaagccgttagaggatcatatcgcttaggtaaagtcatgaaagactcgattgatgccgtattatctgtttactatgccgaaattaaaactaatcagaaattgattaagaacttagataaagcaattacagatatcgtccaaacgcttcctgaagagagaatactacaatctattccaggaattgggtcagtttattccgctggtattatcgctgaaatcggcagtattgatcgctttgacactgaagcacagctagctaaatacgctggtctagcttggcgtcaaaagcaatctagtaattttgatagcgaacacaaaccgatgactaaaaacggaaatcattatctaagatattatttggttgaagctgccaacctgattagacaaagagatcccgtttttcggaagtactatcaaaagaaatacgatgaagctttctattctccgcataaacgcgcttgcgttctttgtgcaagaaaattaaccaggaccattttcactctgctcaaaaatggtcaaatctatcaaacaccgaggtgattaattggtctaaaacatttttggaggagtaaataatagttgttaaaaaatcccttgaaatagggcttagtttcatgcacgcaaattttggttttaaaacaaactaattaaaaataaaatttaacttttacattgacttattaccacatgactctctactatctattataagcaagctgtcaattactttacataattttaattattatgcaaaaaaagaagccatgacctgaaaatcatgacttctcgcgaattcctcgtccgtaaatcgaaatcttcacgaacatttttaccttaacacaattaattatactagtctaattaattttaattactaaagcttcatatggcttcaatgagatattctctcctagtttgccatcttgtgcagaataattgctcaatacgagttgataattcttattttgatattgttcaggcaatggtgctacatgatcagtaccatagaaattagtgaaaactaatatttttttagcttcatctttcaaaaaacgttcataggcaaaaatttgtggatcatcttttaaaaacattctaatatggccatcagaaatcagttgttcgtgcttacgcaacttgatcaatttttgatagtaagcaaaaatttcaccctcgtgtaattctttttcaacattaattctatcttgatctgttggtaaaagccatggctttgattcactaaagccagcaaatttactatcatcccagtgcatcggcacacgagagttatctcgtgctttagtttttactattgcaaatgcttcatcatcgcttattcccttttgtttcaatgccgcaaaagcatttttagcttcaacatctacataatcatgaattgaagaataatgtggatccatcattcctatttcttcgcccatataaatgtaaggagttccgcgcatacaatgtatcgcagtagcaagcatttcggaagatttctctcgatatttaccagtatcaccaaaacggttaagggcccacggctggtcatgattgttccagaacaaagcattccaaccgccaccttgatccattttttcttgccattcagtaaataagtgctttaatttcatgaaatcaaacggctctttagaccacttttcaccatttttataatcgacttttaaatgatggaaagtaaagaccatggacaattcatgctcactcggcttagagtactcaatcgaattagcaatagtagttgaagacatttcacccaccgtaattgagtcaggatcttgaccaaaagtagagcgattcatttctttcaaatattgatgcactactgctgtatcagtataaagactcttttcctgacttggatcaccagttgaatcaactaacttttcatccttaccggtcacgttaattacgtcaaaacggaaaccatgtactccctttgaacgccagaagttaattactttgaacaattcttgacgaacttctgggttatgccaatcgagatctgcttgagttggatcatataaatgtaggtaataataatccgtatcaccaaattttgcccaagctggtccaccaaacttactttgccaattattaggcaaggagccgtcaggcttagcttttcttaagtaaaagaatttgcggtacttttcgtctcctgccaaagcttttttaaaccatatattttcggttgaacaatggtttagcaccatatccaacatgacgccaacgcctatttcttttagctttttagttaattcctcaaagtcagacattgtgccaaagcgaggatcaattcggtaataatccgcaatgtcataaccgccatcattctgaggggatacaaaaaagggattaaaccagatcatatcaacgttaagcttcttgatgtaatcgattttagcgatgatccctggaatatcacctactccatcgccattagaatcataaaaagatttgggataaatttggtaaattacttttttgcctaaatctgtcatttttatctcctataacttaattttctgtctacgagcaaagtcaataaatttaaactttttaggattatgaaaggataaagttaactgaaacagcgttgtatctgctaaaaaattatgactagctactagtactgcttccttactatccaattgcaatttctcttgtaaatcagcatcgatttcttctaccgtaattgccttagttgcataggatatatctagccctaatttattttctaaataattgtagattgatttttctgcttcttctgatggaagctcagtaattggtggattaaataagaaatcacagtccagcacttctggttcatcgttaatcattcttaaacgttcaacatagatccctgcatgcttcttttgttcagggaagaatttcttgaaaattgccggcaaatcatcaaccatttcatcattaagtagcttagtttttgcattcattcctaatgatttatttaattccgcaaagctagaaattcctgaaataggaaacgaaaacttttccaaattaaggacaatcgaacctttgcccttgattttttggattaatcctaacgaggtcaattgctgcaaagctttacggactgtttcgcgtgacgcgccataaagctctgtcaattgattttcactaggcaagcgctcgccttccttaaattgttgatgtttaatcttagaagctaagtcttgagcgatcagttcagattttgctttagtcatcttgaccttgtcctttcttaaaatcatgttcattatatttttgatgtacgtacatgtcaatagatatatctaaaaactatattgcaggcatgtaatcattttcataaaaatctattgacaacttgtacgtacaggaatattataataaatgaattttgtgaaaacgcttttataggaaagggagaataacacttatgaataaaaacgaaattgcattacttgctcctgctaatggtcaagtaattgcactaagtaaaacaagtgatcctatctttagcaaaggaactatgggtgatggttttggtttaacaccaactgataatacagttcttgcaccagttagcggcactatctcaatgattgctgaaacaaagcatgcgatcggaattactactaaagatggtctagaagtattggtccacatgggagttgatacggttggacttaaaggtgaaccgtttgatgtagtaattaaaaatggtcaggaagttaaagctggtgaccaaattgccacgatgaatatagagatgattaaagcaaaagatcttgatactacgattatgactttaatcaccaattcatctatgaaacttgatggcttagatgtaactgaaggtaaagcagaagctggcgatacagttgctcgagcttatttaaaggagtcaaaagaagatagttcagacaagaaactttcgtatgatgaattagctactttcattattaagaatgttggtggtaaagataatataaataacctgattcactgtatcacacgtttgcgcttttatttgaaagatgagtctaaagccaatgatgatattttaaaaaatcaacgtggcatacttgacgttatgcatgctggtggtcaatatcaagtcgtaatcggtaatgaggttaccaatgtttacgatgcagttatgaaacaattgcctggtcttagtgacaatccttcacctcaaactaataatcaggatgatggtaaaaatcctgtttctagagcctttagtaatctaattggttttattaccggctcaatgagtcctgtaatcggtgttattgcagcatcgggtatcatcaaaggcttacttgcactactcacccttccacaacttggtgctttacttagcgtcaagagtccggtctatgtcacagttagtgctatggccgactctgctttcttctttctaccagttctagtaggatttgcagcagctaagcggttaggatccgatccaatgattgctgcagtaattggcggtttcttagtttatccacaaatgattacttggggcaagagtatgacgacaatgtttagtcttggatcttggaacttccaattcttaaactattcctactctatctttccaatgattttagctgcttggctagctaaagaatgtgaacagtggttaaagaaagttttgcctagttacttgcaaatgatctttaccccattaattactatccttgtagtttcaactatcacattagttattaccggtccaatcattcaaggagccgcaaatggtatcgcagtctttattaactggctagtatctgcatctggctgggttggcggcttaataatcggtgccttttatcagttattggttatttttggtcttcactggggcgttgtgccactagttgctcaacaaattgcctcaactggtcaaagctcattaaacgcaattatctgcgcaacaatggtttcccaaggtgcagctgttcttgcagtcgcaatcaaatcaaagaaagcagatatgaaagagctaggaattgcagcagctatttcagccttctgcggtgttactgaacccgctatttatgggattaacttaagatataagaaggtctttgcttcaggttgtattggctcagccttcggtggcctagttactggtttaatgcatggtactatgtatggctttaccggtggtctaattggcttctcaagctttttcaacccggcccatcctactccactaaatagtttctatactttcctaattgccagtgctgtttcaattatagtttcatttattgcagtttgggtatgggatataatgacaacatgactatgggtaaaaaagtagccaagaagcaacgcccaggttcagctaaataaaaatttagagcaaaataaaacgatgaatcacccacaaaggtaaattcatcgttttttgtcttatttaagcagcatcagcaatccgttgtgcctcaattaattcagcttttctgatatcacgaggcaagaactgacgaatatcttcttcattatagcccacctgcatccgatggtcgtctgcaataataggtctctttaataatcctggattctgagtaattaaagcaaccattttagacaatgacaagtcttcattcaacttattctttaattgtttgaaagactgtgaacgagtagataaaatatcctcagttccattttcagttaaagacaacagatgaaggacatcttctttagataattccttaaagacgttcttttccttgaaagaaagatgatatttgttaagccatgctctcgccttacgtgaagatgcactacttgttgacatataaagagtaatcatacaatacgcctctttctaaaaaactcgttaacttctcgtacattagttctattgtataacttactttttgatagtgcaagctatttttacaaaaaaattgttgaaaatagtatacttaccttactgaaagaaggaatttgatgaattttaaaacaccaattgccgaacaaatgaggccgcaaacactggcggatatggtaggccaaagtgagttgctgggaccaggaaaggctttaagaaatattatcaagcagcatgttaatatttctttacttctctgggggcctcctggtaccggaaagacaagcttagctcaaattattgctaaagagaatgattatccctttgcttcctttaatgcttcaattgataataaagcacagttgaacaacattattaatgcttataagtatcagactctcgttcttttaattgatgaaatccaccgtatgaccaaaaatctacaagattttttattaccttatttagaaaatggtcacgttctacttgttggctctaccactgaaaatccaattatgtcgattgtgccagctgtgcggtcacgttgtcaaatctttgagttcaatcctctaacagaagacgatattgcagctgttttgaacaaggcatgtactaaggtccttaaattagtagatcaccaagttgaaaaaaattcgttaaatttgatagcagccgcagctgatggcgacctacgaattgctttaaacattttagagactgttcatgcacttaatcctaaaaagatcaccttagcaaatgttaaatcgtttactaagcagcaattctttagctatgataagaaagccactaaacattacgattatttagctgcatattctgactctatggctggctctgacacagatgctgcactttattatcttgctattttgctaaaaaatggagatttagcttcggttgtacggcgtctgcgtgagattccatatacttatattggcttagctaatccgcaacaagtaactcaaattgttactgcagctaatcaagctgaaaagataggaatgcctaaagctaaatatccactaatgtttgcaacaatgttaatgtgtatttcgccaaaatcaggagcatttgaggaaatttgggaaagacttgatcaagatagtgatcatcccaatcggtatcccatgcctaatagtttgcgtgactttcattataaacacgctaaagaaatcacgggagctggcctagctgagtcaccttttcaagctccgcatcaaatcgccaagcaaaattatatgcccaagggactcaaaggcaaacaatattattttccaaaagacaatcaaaatgaacgcagattatatgagcaatacctaaaattacatcgttatatttacggcgaagattatcaaaaataaaggacagcaatgcaattgagcatccctgtcctttttggttagattataaatgaagaaaattggtttattaattgcttctacgagagaagattctcgtccagccacctatatggtagttctatttaagttatttgttaaatgctaatcgaaaaaactttacgtactttttacgtattttattaccaataataacaaaaaagcagcggcgcaaatacagcgtcactgcaatatgtagcaagattatcaatgaagaaaatggtatttatcacttctaaggaggaaggatatttcatctagccacttatatcctaatgctacagtattaatttgttaaataaaacggctattaaatctaccaatatttttctagtggcttttcattcctaccagtgcgagtttgacgcaaatgttcagtcacaatattagtcaacacttcggctaatttatcaatctgctcaacagtcacatattcatatcggccatgataattgccaccaccattaaataagttaggtgtaggaattcctttaggcgaaataaagtttccatcagttccacctctaaaggattgtacatttggctttagtccagacttgcgataagcatcaagagccagatttacaatatatggcttgtccttaatatagttgtagatattttcatattgctcacgaatatttacagtaaatacgcgtggtgctagttaaatcgttttagttaataaaaaagtccaatcttgttagactcgacttgtaaatagtaataatagaaaagagtctgatctgattgaactgccttaagcttaagcgttttagccaccatttacaagttagttttaaagatttagtgataatttgtcggcactggtatcgtttgtatgcaccggctgagtttactcatcggcgaaatattgatcaaattaaaactacggacagtctgattttggctttacttatctggcaagctaagacaggaattgaatcacaaagaagattctgtgaatgtttcaattgtttatcacactcacgttttaatcgacgttcacgtcagctattgcaattgatttatcagatacggcaagaaatgaataaaaaggttgacctgaatggacagttcttgatcattgacagctttccggtacctgtttgccaaccaattcgcaactatcgtgctaaaatttttcgcggttatgccaacattggttataaggccaccaagaaaatttacttctatggtttcaaagttcatgtcattgttagcgatgacggttacattcttgattatgtcgtaacaaaagcatcagttcatgatgccagggagacagttgaactgatagaaaatacccatccatctaattactatcttcttggcgacgaaggctatttaggcaaagaactgcatcaacagctaaaacaaatgggttacgaactttggacaccatatcgtaaaaatatgacaggagctaaaaagcacaatgatcatcaattgatggctattcgcagaacaattgaaagcgacttttcgcttctgacctattacaatgccgagaacaatcgagcacgtagtctgataggctttcaaagccggttggaaattgcaattttagcttataatttggcttattgtctagaacgatttaactagcaccacgcgtacagtaaatctattgccatactttttgttcatctttttaactatatcgcgaataaactgttctttacggttatattcactttgatcaaaatcacgaataatcatgctaatatcggcatgatcaacattgctttgagcatgtagaaccaagaaataaccatcatgattacgtgacttttcaggcacttgatcctgaggtaaattagacaaaaaatcattcatcaaagttgttgcgttaaccatcagaccatatgcttcaccggggtgaactacagtccctttaatatggatcgtaacctctgacgcattaaaggtatcgtattcaaaatctcctggccgcccattgtctaacgtataagcgaattctacattaggaaaatcagctggatcaaaatattgaccaccacagccaatttcttcgtctggaccaaaagcaacaaaaacatcaccgtgttcaatttcaggatgttcagttaaatatttaagcattgctaatgccccagtgattccagccttatcatcaactcctagcaaagtatgaccatcagaagtaattaaggtttgtccttttagatttaataagtctggaaactcagttggatcaagaacaatattatctttctcatctaggataattttctgaccatcataattttcgtgaatttgtggcttaatattaactgcgttaaagtctgcagtatccacgtgagcaaagaagccaataggcgttaccttttctgctgtgtttgcacttaactttccaattgcaaaagctgttttttcattatagtaagcatcaagcccaagctctttcatttcctttactagttccttggccagctcaacttggccaggtgaggaaggaatctgatcatgatgttcataatatgagcgagtattctttttagctaactgaataaaccgtttttcttcataatctaaattataaaaactcatatcatattccttcttacattaattccatcgtatcacttgaaactggctcagacttgggatctgaccaccacgactctttaactgttttgataattttaaaaccatgctttgcatacagcgctttagctgctatatttgcgctaaagacttctagcctaatcggccgtctaatatttggtaacactgaagctagcaattgatcaccaataccacgtcgttgaaattgaggatcaatataaaaataagctaaattatgtggcttatacgcagcaaagccagcaaattcattattaacttctacaatcctaatctcagaatcaaagaaattataccagtatggtgcttccttaaacggaataaaatatttctccactccgcctattttcatttcttgcaaacgagccgcatcatgaacccggcacaaatcttcgtaatctaaactttgaaaacatctagttcttacttgcataatttactcctttaggtgaaagagttaataaatttttatttttctttaattatacagaagtgaattatacatttaaagattttagttccaattcaaccagtcttcatcaaaaaactcaactttttcttcctgtgattctaatttctcttgttgcatcatagctattatcatctcatctttctatttttagaccattagttcgcatagaaattatatcaaacaaaggttcatctttctactctttttcaaaaaaatattaattgagttagtaatagatgtgaattacctatatttttatccacaatcgcgataatatcgggcttcagagccatgtttcacgtttattgtttacatttagctgtttttccaagtaatcaaatagcttttcactttataaaaattgtttcataaaaaaggatccaacttaatggatcccttaaacatgttattcgtaaataattacaggttcgccctttttaatattgttccaaacgcttcgaatctcacttggtttaacattaacacaaccatgtgagccaccctttaggtaagcggtcttgctccaatcagtccgccaagaggcatcgtgaaaaccacagccacttaaggtaaatggcatccaatacttaactggagaagcataacttgaaccatcatcattggtcccacgcaatgtacttggtgattccttatagtggatataccacaccccacgcggagtttgatcacccttagaaccttccatagtaccggtaacaacatcacgaagatgaacggctagtttaccctttttgatcaaccatacttcttgctttttcaatgatacaacagcataagtatcaccaatctctttatttgaataaccatagccgtgaggataagtgctgtagcctaaaccgtaaagtgcatctgcaccatcaaaatttttttggcctttggcaaatgcttcgagaagtaagcgttgcgtctttttaacataaacgccccaaccccaagtcttattctttaccgttatggttttgcctttaactttattgccctttggcactgtaaatttatagctcttgtgtaatgttgaaacttctttatcaatttgatttaacttagtcgttaatttactagtatcaccaaattgatagcgattatctcgataagtcacattattcaataaatctttggcctttaattgatagtttttgccattaattttataagtaatctctgctttgcttaagtcagttagtttctttttagctgtagctaaattactagtagtaaacttataagtctgagtcgatggaattttagtttgttgcttcttaaaaaaggcctttgtctcggactcatctaatgattggactgtagtgttatagctataaaccagtttgttattttttaactcaacttgatttttagctttttggttaactttagccattgccttagtaacggttagctttcctactttaactccatcgattgtaacattagggttaaagtgagttttagcatatttttctgctgcagcttgtgttgccacacggtgattatgaatgccaaaacccgcgattactccaacgataattaaaactgcaatcgttaaaataataatattgtttcgtttattctttttctttaggtcttcgttcatactatcctaccttttatgccagtaataatatctttaatatagcaccttgcaaatttcgtgtaaaatctattgatttatctaaccttttttataattagacgactagcatcccgcaaagcaaaatataaaattggtgtacaaattgcagtagaaattgaattgattacagttgcaggcaaactaacaaaggctccaactaacgctactttaaagctcgtccccaccattaaagcttcaacaattgaaacgcaataagtagtgaatatcttagttacccctgcaataatacctaaaataataatatttcttttactatcttgatagtgcattcctcgataaactgctgtcaaaaccgaagccactactactacctcaagcatagttaaccatgatgttgcggcatagccatttaacaaatcaaaaccacctagaccaataattcccgcaatcataccattacgataacctaaatataaaattgctacagcagttagcgtatttccaaaatgaataaatgggcgtcctaccatagcaggaacggggattcttaacacccagatcccaatataaataattgccgcaaaaagtcccgttaaaactaaagcttgtaaagaattcttgttttctctaaatatctgcattattaattattactccatctcttcagtaaatctggtaaagctgctgcataatttggtcctagacgtgaatcttgcttgggtgtttccctgattgcttgtgcaacaaaatcggccgcaattgaacacgctttttctaaattttctttatgcattaaagcagcaaaaaatgcacttgcaaacaaatctcccgtaccaaaataattacctgggagttttttctgaattaaagaccaactatgatcggctgtaattccaacttccgcaattttttccttattaagtgaaataccggtaattatgacattcgagacaccaaattgactagataattcagccgcaaattctgttgctgttttcaatgaattactagttgcctttttgcctaataaaaatgctgcttctgtcatattcggcgttaaaatcgtagccgacttaactagatttcgcatctttattacatagttttcatcaatgccacgataaagttgaccgtgatcacccattactggatcaatcaagatcaatttatttttttgtttaaaatagctaatcttttctgtccaaaaatctaatgctcttttgcccaaatagcctaagtatacagctgaaaaatcaaaaccaaccttttgccaatgggccataatcttagccatttcattattcaaacttaaaaaagtattctcaccaaagccacccgtatgtgtagacaaaattgcagtaggcaatacggtcgggctcaagccacatgctcctaaaacgggtaaagctgcactaagtgatacttgaccagcacaagataaatcttggctaactaatacgccaccattaaccatcttttttactccaatcaaaaaaaccctgctttaagcttaacatgaagtttaaagcatgaaaaattttattttgcgctaaatgtattagccttgatatgattcaaaatttgataaccaatttgtttatttctgttttcatcattttgagtttgatttaagaacataatcaaaccattttgattatctgtagtcatctgaatccagttaccaaagtgagtattatataagttaccatatgctaacttcaagttatcattattcttcatatataaaccacctgaataaccatttgatgaacgtgatgttaaatgagtcatataatcaaagtctgttcgactcaaaatttgcccattggttaaaccaagttgaatacggtaatagtccattggagctgagaacaaattaccagcacctaccaattgagaagcttgagtctttttaacatattgagcccattggtaattcttttgattccaggtatatgagataccatccgtcatcccggctggaatatcttccaagaaataagttcgctttaagccaagcttattaataattcgttcctgcacattttgcttgtagctttgtccagtttcttgacgtataattccagctaacaaaatatagttggtattattgtatgaaaaattaccaggttgattttgcgtagttgagtttagcttattaacaacccaattaattgcatcagcttctgaataaacacgtcctctatttacttcagtatcagctgctgtcaatccagaagtatgcgtcatcaagttgccgacggtaatattatcagcaccttttaaattaggataccacttagagatcttagtatactgtgtaaacttccctgcagaaattaattgagtgataattgcgccggtaattactttttgcaaagaacaaacaggataaactaccttactgtttcccgcacctaatcgcttgccataataaccataaccataagaaatttgttgtggttgtccatcttttactataactacggtaccacgagcataataactagctaatgtatttctaacaaagctccgcatttcagttttgttataacttgctgcctgaactgtcgagctattggcattagcaattgccattccaacaggcattgaagcagctatagttaaccaaatggttgatttgattaatgttttttttaaattaatacgtttcgttttaaattcccccagcaatgttatgtaaattctacccataatattagcatttatttttttcattggggttacaattttgataaagaatcaatgagaacgtatacattttctttttctaatatggataattatttaaatgatcttgatcagtaatctgacgtattactttagccggtacccctagtgccaatgaattatctggaatatctttagtaactaccgatccagctccaataacgcaatttttaccaatttttacgccgggacaaacagtaacattgctggctaaccaacaattatcgccaacagtgatagctgctccatattcaatatcggctatttttccgtctgattgcttgcgagcatttctttgagttggcaacaaaggatgcaatggagtcgcaaatgttacgttaggtccacacattacattatttccaattgttacgggacaagtatccaaaatagtcaaattgaaattagaataaaaattatctcctaagtgtgtaaattggccataatccacttcaattggtccttgtaaatatacattttgaccatgattcggaaaaagacgatcgataattgctttccgttctacctcatcttcatcagtagtcatgttgtaatcacgtgataagcgatgagctaaactggaaatctttttcagttcttcagtatctgggcgatatggtttacctgccaacatttttttagtattttcttccatcgataaagcctactttctaatttaatcgcttacttaaataaatcatgtctactagctgatgtccagcttcaaaaatcggatgatcataattttttacaaaaaaatctttgatcttacctgagcgtttaaaaccacatttttcataaaaaggaatagttaaggggctatcacccgttccaacttgcaaaatttgatatttattttgatacttcttagcaataaaattaatcaaatgtttagcataccctttaccttgatcttctggataagtggctatattttttatttctactgtattaccattttcaaccgtaataacacattcagatctaacttttcctttatcaatcaagatatacataattccacgttctaaatagcgatcaatcatactctcttgttcatcagctaacaaaagtaagtctatatactgcttcttattagattttatctctttaatttccatgattattttccaattaatttaaaattttcgtaaattgcaataataacttgaacacttttgtttaggctgtttgatagatgcgatctaattctctttcaaagatctcatctggtgtatgataagccaagatctttcttggcaatgaattgcaccaagtttcaatattaatgatttgttggagagagtagttatgaatatagtcacctttaggaatgaatctgcgaataaggccattatgcctctctacagtgcctttatcacaagaagtatatggatgagcataataaactagtgatttggaaatatcttccagctgagatagatccgcaaattcagaaccattatcagtcgtaatagttttaaagatatcgttccaatgctcgctgtattgcttgcgcagacttttaaaggcattcattacactggcagctgttttatctgggattttaataattaggaactcacggctcatgcgttcagacaaagttagcagcacttcgtcgtccttggtcttatggcctaaaacaagatcacattcccaatgcccaaacacatcacgcttattaacttcctgtggtcgttgttcaatactgcggcctagcttcttcttatttttacgaatgcgatgaattttggtattgcgcttgagtttctctggcaaatcatagttatggatgtttaacaagccttgatcgacataattataaagcgtcctagtgcagacaatatcgttgctggtaaattcccctacagcagtgcagcgattactgcaggcgtcgagcgaccagccatcttcaaaaaagtgctgttggacgtaatcaataaacttatgcttcttaagaaaatccgatttgcgtccacagtatcgacgattgttttgataaacactctgaccttgttgggctttataacgtttaactttaccgtgatacagcttaacagcccctcgtttgatctcatagtgaattgtactaggggaacagccaatttctcgagcgatggaacgcaaagaacaatgatctttcaaacgagtttgaataataacccgctcttcaagcgatagatgtgttccttttttacgcttgtccatgatagaatgtagtgagtccattttgacctccatagatgtttttgtggttattaacattctatcaaacaggtccaaatggacttttttattttgtatcaagtgttcaatttaattttacaatcggcaaatttaaaatttttctctttctactcatattctatgataaactcattattgttataaaaataagtataaacgaggaaaaaatgcgcaaaaaaaatatttattctatttgtatcggattaccgatctttttgattcttgcattctctattatggctcatgcaagttgggttaccggctttgacaatttctttgaaggcttagtccacagtattcctaatctgcagagcattatgcatgtaattacatttttagcagatactaaagttgacttagtttggatgctgttgatagctgtcattctttggctgaaaaagcagcgtcctctttcggcaagtattgtcatttcactagttacagctgatgcttttggttggattgttaaacatataatccaacgggcacgaccaactgctcacttagctgctgatgatggcttcagttttcctagtggccacacattaggaatggcgattattgttttctggctaatactaatattgattccagctttagttaaaaataaaactgctaaaatctggctcactgttttattagctatttggcttgttttagtaatgatttcaagagtttatctctacgctcactggccaagtgatgtttgcggctcagttgctatgggcttaatgtggattggcttagtagatgcaatttgggataaagttactccacaaacagacaaaaataatttttaagattaaaaatagtcgacgataagtcggctatttattttgggcaaaaagaaaaagtcactaaggaaaatgtccttaatggcttttctacaccttcaaatttcttcctatcagcagatgtcataagaaacatcttgcttagccttttcatcctcggagcgctcatcacacgctccgctactatgatatcaaataaaaatacctgaattgtcaaattaagtgcaacagttaggttatgaagagatatattgcttgaagagttcctctgctgtgtgatattggaggattcggcgatatttgtggttaatggcatcagttgcctgttgaacataagcttttgacttgtctttcatgctcttgcccttagggaagaattgacgcaaaagaccattgcagttctcattggtgcccctttcccatggagaatatgggtgagcaaagtaaatctggcagcccttgatcttggtcatatccgcaaactcagagccattgtcaaacgtgattgatttaaaccaggcaggatgtctgtcaatctccttttgaagcagcctttggcatgtgcttgcccgatagtcaggaatcttgataactacttcaaagcgtgtggttctttcagtcaaagtcattaaagcaggctgattcttgcgtctgacgcctttaaccagatctccttcccagtgcagcggagcttttctgtcttcaatctctttaggacgctgttcaatggaattgccaagatgcttcttgtgcaaagcgtgaccgccatggctgtgatgacgcttgttcctgcgtcttttgagcttcataggcagatcaatattgcttatgtccagcaagccctgatcaatatagcgatagacggttggtgtgctgggacaagggtagcctggcatagtccttttgaattcaccaacgaactcatcgatgctggtggcatcaaatttagctttaaagcgtctggagagcattctcaaaaagacagcataatgcttcaatggattgcgctgatagcagtttttgcgacgcttctcataataaatctgtgcagtatcagcgtaatagtgctcatacaataaatagctgctgtctctttgcaggacacttccgcgtttgatttcgcgactgattgtcgacttatggcagccgacttcttgagcgataacagtacgggaagttatgccggaatccagcattgcttgaatttgtccacgttgtacgctggttaattgatgatagtgcttagaaatgctagaatttgaattggtcataaagatcttcctttcttgatttttcgtcacttcaagtttaggtcttcatggcctttttgtttaacacttagtgttgcacttcaattttaaatccgggtcaaataaaaataaaaagataaagatttttacttgataaatttcaaaaaaagtatatgaattattaaaaatcaaatttgtatattgctatcatttttaaccttttttagctccgatttaactgatttgcttttagcattgttaattgtcttaaaaaaggcggaaatttggccaatttctttttcggtagtcgaacaacagccacctattattctagcaccatgttcataccactcttggcttaactttttaaaatcgaattttgcattaaatggaatccaattgcgctcaaattcgttataaacgccacccaagttaggataaatgacaatttgtttatcagtaaaatcatgaattttatcaattactgcagttgctaaaaacggtttaaagcaattggctccaatcgcaaatacttgatcatattcattaagcttttgcactacccgctttaaaggagtgccatcactaattttagttgtatcatgcaatgtaaaacttacatacactggaatttccggagcattttcctttaaccaatctaagattgctacaacttcatccaatttaggctgagtttcaagtgcgagacaatcaggtttatttgccaataaaatcttcaatcgtggtaaatgaaaattaagatattcctccgttgttagagaataatctccgcgaaattcatccccttgagctaaatatgcaccataaggtcctactgaagccgctacataattatgaattcccgttgtctttgcaaaatcatcacgggcttttttggcaatttgaactgcattagtaatcaatttagtagcctggtcttgtgtaaaaccatgtttttcaaaagctgggatatttgcttgataagtatcagtaattgccatctgggctccagccttaaaataattcatatgtacttgataaatttgagcaagattatgttctaatgcaattgctgtccaaagttcattatttgtatcaatgcctaacttctcaagagctgtagacattgcaccatctaagattaatcctcgatcacggatctgtttgagcaaattcatttttctcaccttagtataaattgagtagatagttaatatatatttaatattgcattaatcttagatctgtttcaaatattatttcttcctatgtcttattttttagctacagtttgctataaatttatttaatgctattttcatataatattaaaatagatttttgaaatcatgtaaataattggccaaatagtgtgccgttaaactttcaggcttttgctttaattctaaaggcttaccctcttggacaatccgaccaccgtttttaccaccatgtgggcctaaatcaatcatgtaatcacaattgacaattaaatttaaatcatgagtgattgtaataatggtagctccctgatctaacaacttttgcattacttggaccagaaccttcacgtcaagaggatgcaagccaatcgtaggttcatcgaaaacaaacaatgcatcattttgtttatgactaagatgagtaacaagtttaaggcgctgagcttctccacctgacaaagttggtgtatcttctcccaaatgtaagtaatccaagcctacttcttttaacaattttagctctcgttcaatcttaggcactttaacaaaaatcggtagagcctcattaacatctagatttaggacatcaacaattgacagatcatgccacttcaccttttgtacatcttgattataacgatcgccatgacaggttgaacagacttgttgcatatctggtaaaaattggatgtcaagagtcacaattcctgtaccaccacaagtaggacaagctccttgtttattattatatgaaaaccaacttgatgtataatgcttctttttagcgagtggctgactagcatataactttcgtaaattgtccataattgaagtataagttgctacagttgaccgagtacttttaccaattggagatgcatcaacacttactacatttgaaattgggctagaaaatctactaatttgttttggcaatttttcactttggctttttgctataatagcgggtactaaactatccagaatcaaactagttttaccggcacctgaaaaaccagttactgcagttaattggtttagtgggattttagtttttacatcatgtaaattaaaatattgctttacttcaaataaaatagaatcggaatttattcgagtggctggctctctggcaagtagtttagcactaccatccaaatatggtcgaattaaagaatgttgatcatgtttgattgcagtaattgaaccttgatccaaaatctgaccaccttttttacctgaacctggaccaatctcaattacctcatcagcggctttaataatgtcaacattatgatcaacaactactaatgaattgccctgagcaactaactttcgtaaaaccttaattaatcctgcaacattagcaggatggagaccaatagaaggctcatccaaaacatataaaattccagtagtttcagtacgtaatgttcttgctaattgaattcgttgcaattcacctgtcgataaggtatttccacttctagccatagtcaaatagtctagccccaagtctaataatggttgcaaattatccaaaaactcctgaataatcgaatgagccattttatgcatattagttggtaaagttgcttgcacatctttaacccaggtaactaaatcacctaactgcatttcggccacctgattaatattttgcttaccgaccagctgttgtaacaattctggtttcaaacgactaccatgacaaagtggacaagtcgaataagtaaagaattcggctattcttttttgcgcacgttccgatttgctactctttgctgaacgatagacagcttgccgagcattttcatataaggcattaaaatcatgaaataccctgccagttcctgataaaaagtccattttatatttcttttcaggaccatttaagacaaaatctttttctttatcagtaagatctttataaggaatgtcgatcctaacaccagcatgttctgcaacgttaggcataaagttccgtcctggcaagctccaagatgcaactgcaccatctttaattgacaaattttcatccgtaatcagtttagattcatctagttgccgtatcttaccagttccgccacactcagtacatgcaccatctgaattaaaagcaaattgttcggcacttggtgcataaaattttacaccacagactggacaagttaattgtcccatttgctcacctgacatactcattgcctttgcaattgccaaacttggcttcaaatggtgtccattaggacaaactggagaacccaaacgagagaaaattaagcgtaaaacattaaaagtctcactcaaggttcctactgtagctcgctcatttggtacacttggacgctgccgtaaagctaatgcggagggaatatgtttgacgctagttacatcaacctgatttccctgtttaattcgcctacgcatataagttgacagagcatcaagatagcgtcttgaaccttcttcataaagaatccccattgctagtgatgattttcctgagcccgacagtcctgaaattgctacaaatttattcaaaggaatgtcaacgtcaatattctttaagttatgtactcgtccgccacgaacttcaattttcgttggaatcgtcattaaatatcccctttccattatttagtcattatctcttttaatctataatcatgaattaccaacaagcaaaccaatttttggaaaattatgacaaaattactattaaaaatatgtgttatatgatatattataagtagataaagtaagcgcttacttttgaaagacatagaaatgaggtgttgttgtgatattgattaaagaaaccgttgttttttcttttgatagatataaaaataccacatatttagagacacccatcaagctaggagtcatgcgtaacggcgcttgattcgtgtcctaaataaaaatgagggttacattttgtaactcttatttttgttcttaaaatacaaaagaaaatcagtacaaaacacggagtttgtactgatttttaatattctaaaggttaattatttaacccaatcgcggacttcactatcatcacgtgcaacaccaacaacattcagaccattagcccattctttaaagtgactgacataagccttatggttagtgcctgctgaggtaaagaatgatgcaacttcaccacggtagtttttcatcttttcaagtaatggcttaattggagttgcaggatagcctgaccaaacagggctaccgactaaaatcaaatcataattattaaaatcgatatcatccatttgaatttcaggataaggaaccttaccttgaatttgatctagagcaatatcgttggtcttgtacatatctgaatcaaaagcgtcaggagcaacagttacttcctttaattcgctgttttcaatttctccgttaatctttttagccatgttcttggtattgccttcccaagaataatagataattaatgtttttttagccataaatttagtccttctttcatttacatttattgtaataaaaaaagaccggtttgaccaatattttaatacgcgtggtgctagttaaatcgttttagttaataactgaaaattgaaagcaccaaaatcaagctcaagtcctgtcactattgagctttcttagacgtaattagtttttatatgatctgtttcagtgcaatttgtatgaatcgtggcagttggttaataaagtcattgattacttcatctatcttttcaaaactattctgtttaagctcttttaattctgaaattaagtagaccaatgcatctacgaatctaatatcaggtaaggattcgttcattagatagaataaatctccgattgtcttatcatctgtattttgtctttcctgccaggtcaatagatcataagttattgctgtaactgcgatatagccacattggccatcatagctttgaacttgagatttatctaaagcaagatattgcttagacgtcttaaaatatgtttcaatttgccatctacgaccataaagttggatgatttcttcagggctaagctttgtctgagtagtagctaaaaccaaatacttgttcttgtttccacggttggagacaaagacgagctttaataaaaagctatgtccatgatattgagcctcaactatgcttgaataaagataatgtttctttttacggatgtttgaagcagccaaacgatcatacaagtctttaacgctatagcggcgatggcgataaatgtaataaatctttgaactcttcttgatcatgccaagtccatctaaaccgatcttctttaaaatccaaaacattcttggagaagaaaaccaagaatcgaataagacgtatttagcttctactcctaatcgtaaggcttgtctaatcaactctacagttacatcattcatctttctctgagcttgatttctccttttaccagaaattgaacgttcatcagcagtaatgggagcagctccaatcatatttttcttggttttggttgacatcaaggcaaagttaaccggcaagaaggtattgccatcgctccagcctaaagttaaaccacgatatccgttcaaatactcatgcttgtcatggtcatagactttagctagcaattcggtctttttagaaaaagaccgagccatcagcgtatcgtcaacgataaaagcaagtcggcgtcttttatcgataaatggttttaagcagccaatgagccgggctgcaatcaagcataatagtttttgccagttgattcttccatcgttaagtacattgcgagcagttctaacggaaaaacgtttgtcatccttagctctgaataaagaaagccgagcaaaatgtactgacatcagccaagagataatcatggttaatgaaacggtggatttacgcttaaaattgacttgtttagttaacttagctagaccaattagattaataaatgaagaaattaaggatttagtatcattttctgtgtcgatttgttctatactgttcattgcgcaggatctcctttactttttaggtcgacacttaaagtataacgcagagagagcctgcgtttttatttttgataagaaaaagccaagaggcgcggggaaggagcgttaatcttagctttcaagttttagttaataaaaaagtccaatcttgttagactcaacttgtataataatagaaaagagcctgatctgattgaactgccttaagcttaagcgttttagccaccatttacaagttagttttaaagatttagtgataatttgtcggcactggtatcgtttgtatgcaccggctgagtttactcatcggcgaaatattgatcaaattaaaactacggacagtctgattttggctttacttatctggcaagctaagacaggaattgaatcacaaagaagattctgtgaatgtttcaattgtttatcacactcacgttttaatcggcgttcacgtcagctattgcaattgatttatcagatacggcaagaaatgaataaaaaggttgacctgaatggacatttcttgatcattgacagctttccggtacctgtttgccaaccaattcgcaactatcgtgctaaaatttttcgcggttatgccaacattggttataaggccaccaagaaaatttacttctatggtttcaaagttcatgccattgttagcgatgacggttccattcttgattatgtcgtaacaaaagcatcagttcatgatgccaaggagacagttgaactgctggaaaatgcccatccatctaattactatcttcttggcgacgaaggctatttaggcaaagaactgcatcaacagctaaaacaaatgggttatgaactttggacaccatatcgtaaaaatatgacaggagctaaaaagcacaatgatcatcaattgatggctattcgcagaacaattgaaagcgacttttcgcttctgatctattacaatgccgagaacaatcgagcacgtagtctgataggctttcaaagccggttggaaattgcaattttagcttataatttggcttattgtctagaacgatttaactagcaccacgcgtattttaatattattattttagctattttccttttcttttgattatttccatcatagcctgaccatactttttcatcttcgcttgccctacaccacttacctctaaaaattcactttcattttgtggtttaatttgtgccatatcgtgcaaagagcgatctgaaaaaatcataaatgctggtactttttgctgcttagctaattccaaacgcttttgtcttaaagcttcaaataaagtatcactttcttcaccagcatgagtagtagttactgaaatcttagcaattcgccgtttgactacagttttgccatctagtacatcccacccatgattagttacatgcactagtggatatttgctaccttcaacttctagataacctgaagcaattaaatagtcaatcaagcttatagcatctttttgcttcattcttagagagccaaaagacttatattgtgtagcattcatttcttgcatgcgctgattttttgagccaatcaaacattgagcaactatcgtttttccaaagcgaccatctagttcataaaccatactaatcactttttgagcatcaatggtaatgtcagtcaatttatcctgatttagacaatttgagcatttaccacatggcggacaatcttgaccaaaataacggacgataaattgctgcaaacattcaccagtattagcataatcagtaattgtttgcaacttacgatattgcagttctcgatatttatcatccgcatctgattcatcaataaagtagcgatattgacgcaagtcaccaggatgatagattaaaatcgcttcgctttcttccccatcacgacctgcccgacctgcttcttgatagtaactttccatattacgggcacttgaggcatgaatcacaaatctgacattacttttatcgatccccattccaaaagcattagttgctacaattacttgaaattcatcaaattgaaaagcttcttgtacttgacttcgttctgaagaatccattccaccatgataagcaccaacagagattcctttcttagccaaataatctgtcaaactttcaacttttttacgtgtattagtgtaaataatccccgctttatcctgatgtgccttaatatattctgaaatatataatggagtattttgtggtgagttgaccactttaaacgatatattagggcgagcaaaagaggtaacaatcatattctccttgggaatattcaattgttcacaaatatcatcttgaaccgcaggcgtggctgtcgctgttaaagctaatatatttggtctgctttttagtgaattgattccatctaataattgacgataagcaggtcgaaaatcatgtccccattgtgaaatacagtgtgcttcatcgacagcaactagatcaatatctaaaaaatttaactgatatctaaaataatcaatcgctaaacgctcaggtgtaatataaattaacttaattttgccttcatatgcctgacgtaaaattggattaacctcttcttgcggtgtagtagaatttaatgctgccgcattaattccattttgctttaaattatcaatttgatctttcattagagaaattaatggtgaaataaccaaagttacaccgggattaatcaaagctggtatttgataacacattgattttccgccaccggttggcataaccgctaacacattttgcttttttaaaactaaatcaattacttgtttttgacctgggcgaaaatttgtatagccaaatgtatcttttaaaacttcttctggattcataaacttatcctaactagttaaattgctactttttattctaaattaacaattcaccccaaacaagataaaaagattcacacttttaaataaagaaaaatgtgaatcttttagagttaaatttacttataaaaggtttcttctactgcatgagtaatcgcaatcttatcatgagcataggacaaaccgccctgaatataaagcatgtatggttcacgtaaagggccatcagaagaaagctcaattgttgatccttcaacgaaacttcccgaagccataacaacttcatcttcgtaaccatcctgatgatatggaattgggtcaacaaatgaattcattggtgaatagtgttgaatagccgcacaaaattttaccatcggatcaggtttaccaaaagtgacagtttgaacaatatcactacgtggatcactccatttaggtgaaacctgcatccccatttcttctaataaggctgcagtaaagaccatacctttttgagcttcaccagtagtatgagctgccataaagaatccttggtagatatcacgcaaataaccccaagttgcgccttcaccttttccagctcctggcactgtcaaccgtgaaccagcaccatcaattaaatcctgccggccaactaaaaaagcaccgccttttactaaacccgcaccagcatttttataaagagaaccagccattaaatctgcaccatagaaagttggttcttcacattcagaaaattcaccataacagttatcaatgaaaatattgacatcgggacgaacttccttaataaacttgagcattggcttgatcttagccatggtaaaagtcttacgagttgcataacctaatgatctttgaattgccactactttaattgaaggatccatgatatcttttttagcttggtcgtagtctacttccccattcttcaattcagtagtcttaaaattaattccccattccttcatgttaccgggcttattaccagcaagaccaattacttcttgaatggtatcatatggcgttccagttaaataataaagggtatcccctgggcgaagcatgctgaaaagaccaactgtaattgcatgagtacctgagccaaattgtggacgaactagagcatcatctgttttaaaataatcggcataaatatcctcaattttatcacgacctatatcgtcataaccatagcctgttgatggaactagatcttcttcaccaacatgatgttttctaaataggtccaatacacgttgttgattatacaaaacctgttcatcaattttttctaaacgaggttggatcattttttcaactttagtcactttatcgtttaactcttttggtaaattctctttccaagaaaaactcatttttaactccctatttatttttgattacttctgcttgtacgcataaactaccattattattttcgctcagatatactccctgaatctctggcacaaaaccaggaaacttttcaatagcatgcgccaagacttcaaagtacttttgatctaccgttccccacttttcaccgggtgcaacaatgaaaacacctggaggatatggcaaagctccttcggcagcaattcttccaacaacattttctaggttgaccagttcattttgatcttttttaaaaagctgatcagctgtagctggtgtcatttgatagtcttgcatccctgatttagaaaatagcttttgctgtaatacaaaagtattattttcctgatagtactcatgcatttcttgacacaactgtttcagggtatagccttgataacgctttggatactcattatataaaaccggcaaaacatctttcattaagtcatcttctagatagtgtttttcaaaacttaaaaaagcttcaagtaaagtatctagttctgcttgactatctcccggtgtaagtaaaaacaacaatgaattcaaatcatttttagctcgaataatatgattttccattaagtattctgccactaccgcgcctggaatacctactttctcatattttgcatttttaacatcaattccgggagtttttaccgtaatcttcaatgggtcaatcattgcttcgcctggaaccattttacggaaaccgtgccaatccgtattttgtcccatttcccaatattctgcattggtagccaattcatcagtcgaaatttcggcaaaattgtcaggaactaatggcttaaatagcttagactttttgagtagttttttccgccattcaattcccattcgcagagtttgatcccaccactttttatttcctgctccagcagtaacgtaggaattaactgttaatgaagcataaagtgggtatgcataactggaagtaacaaacttcagataagcatgattaaagtgcttatgatcaacatatcgtttttgtcctttaatatgagcatccttttttagaatctgtgacgcttgagccatacctgcttgctgtttatgtaatgactgagtaaccaaaatacctggatcatcaggacccaagttaagtagaagtggtgataaatgtctcataattggtacgaattcttcaaagccgccccaggcacagtcaaacagaacataatcacaaagtttaccgattcggtcaataatccattgtgcatcataaaagactccatcataggtttctgcttgtacgattgctaacctaaatggacgcttagcctttgcctttgccggatctatcttagctacttcagctctaattttatcttcagttaagaaggctggatccatttctccaattagtccaagtgcatttcgatcagttggaatgtagaccggctttgctccgctcattaccaaggcagaattatacaaagatttatgattatttcgatcaaataaaactagatcgccttcagataaaagtgcacttgcgcaaatagaattagctgaagtcgttccgttggtacagaagtaaaccttatctgcatgataagttttagcagctttcttttctgcattaagtggcgttccagcatgcgtcattgtatcccctaattgaggaacagtatcacttgtatcggcaaacattagatttttaccaaagaacttattaaaaactactccggcaggatgtttatcataatattgcccattatggtgacccggtgtagtaaatgaaattggttttgcttgagcaaaattgatcaagtcggtcaaaaagcctggcaccatttgcttttcatattctgtagctttcggagtgacttggtcttcatctacctgatcagttactttaatcaatggaatcggaaaaccagattgttctcttagagcttctgcttgttttattcctaatgcatcatcatttttgacaacaattgcggcaagttcagcactattttgtacatcgccaattggaattgacgaccaacctttcatcttattaacattgacgccatttccaatggcaattttcaaaaaatccatcctttttctttccattttgtccacgaaaccgttttacatattgcaaaactttaaaaagtctttataatttttctacagtatagcgtactttttgcattctttcttaaaatacgctacagctgaaattattatataaatattggaggtttttaacaagtgcatttgccttgctcgcctccgagaacagctatgtcaacacaacaataaaatagcttaacttggaggaatttttatgtcagaaacaatcgaaacagtcaatttcgaacccgaaaaaaaacactacatgtcatggccggttattgcattgatcgacttcgtaacgattatcagttttgaaaatattttttatccatttcaaaatcaaggcttatcagtagttgtatcttggattttcctactcttcgcctacgttattccttatgcattgatgtctagtcaaatgggcctaacctttactgatcaagccggtggattggcatcttgggtacgtcattcatctaacgatacactgggctactggacttcatggatgtattgggttcaaactgttccttatttggtcgatgtttctaattcagttattgtgtccttttcatggattattttgggcaacaatactttagacaagcatatgtctactttttggtttgggattttgacctttgtcattattcttgcctttattttggttgaaaatgcaatcaagaattcacttgaactactatctttaattggtggtggtgcaatgtttattatgtctatgctctttgttttacttgctgtttggtcagttatgcatggacaccatattgctacccaaccatttaacttggccgcatttaagccatcatttagtttacgttacttttctaccactggtcttctaatcttcgccatgtctggtgcagaacttgctgctccttatatcgtacaaatgcgcgatccaaaacacgaatttcctaaagcaatgtggatgttagctttgatgactggattcttgactatcttcggtactttggctttagcaatgtttttcaatgctcatcatattccacatgatttcaagatgaacggaccttactatgcatttcaactactaggcgaaagccttggttggggcaaagtattaatgtacatctttgctgttgttcaagccctctttatgatggcccaattagcagttttacttgatgcatcaagtcgtgtctttgccggtgacgttgccgacaaattcatgccaaaatggttaactgggaaaaaagacaaaacaggtcgtccagttcactcgtacactttaacttgtggtttagccttattcttgcttttacttactgggactttgccaaatattaattcaatttacaattggcttttaaatatcaatggtattatttccccatacaagacttgttgggtattcttcgctttcattatgttacggatgcaccaagagaagttccactcagattatgtcttcattaaaaataagactggtgcccttataatgggctggtggtgcttaatctttacctttatctgtgctactttaggatttattcctcaagaagcagaagcaacattcggtagtgcagcctttaatcaccaattaattatgaatattattacagttatcgtactctttggcttaggcttcttactaccatacttaagaaaacgcgaagaacgtaaagaaatgaatatataaaataaacatgcttcgatcagttcgaaaatcgaggcatgtttattttattattctaagatttcaacctgcatcttactaggaacattaacaaagtcgaattgtttttgaaaaacatgatcaaaccgtaaatcataaacagaaccaataattggtgttaatgcaaaagctcgtaaagtgttcatatctttagttttattagcataaatatgatgcatttgtggtttgattttataaattcgttctaaatattgtggacttacctcatcaacatagccttctagagtgaaaccaatgctagtgagagtttctcttccgcgcaaagcggtaattgaaactttattgtgtcccttaatatggcgataaaatgacttctgattagtcgttgcaaaaataagacgaccatcttcattaaagtcaatatcgataatattggtatgtggatcaccattttgatcaacggtaccaaaaattactgaatggaaacaatcaacgattagatctaggaattcgtcgttacttaaattacgatcgagttcaggaacatgttgtctcatattaatctttccgtttctatatactttctgtaatttttatctatattatttcttatagtgtacatgacacaattaactaaaaacaactttaatgctcattattttcccattttaaatgtataattgtttaatattaatttttctggtaaaattttagctaacaaaaaataagaaaagaggcagaatatgaatatagattataagaaattggtccaagccaaaaaggacgacattcttcgtgatcttgacgaattaatcgcaatcgactcatctgaggatttgaataatacttccgaagagtatcctgttggtccaggtccagttaaggcaatgaagaaattcttatcgtttgcacagcgtgatggtttccatatcaaaaatgttgacaattacgctggccgtgtcgactatggtactggtgaaaaacgtttaggcattattggccacatggacgtggttccagctggtgacggctgggtaactgatccttttaaaatgttaattaaggatggtaaaatcattggtcgaggttctgccgatgataaaggtcctgccctagctgcatattatggcatgcttttacttaaagaagctggatttgaacctaaaaaaaagattgattttattgtgggaaccaatgaggaaactaattgggttggcattgattactacctaaaatatgagccaacccctgatcaagtattctcacctgatgccgaatttccaattatcaacggtgaacaggggatctataccctgaccatgacctttaaagatgacaataaaaagggatcagtagtccttaagtcattcaaggccggcattgccgaaaacgtaactcctcaaaaggcctatgcaactattgttggtagtgatttagccacaatgaaggaaaaatatactaagtttttatcagataataaacttgaaggcgaattcactattgagggcgatgaagctaagattgaattaactggtcaaggtgcccatgcatctgcacctcaagttggtagaaatgcggctacatttttggcagtatttctagatcaatttgattttgctggtcgcgatagaagctggcttcatttcttagccgatgttgaacatgaagactttaacggcaaaaaattaggcgttgctcatcatgatgacttgatgggtgatctctcaagtgctccatcaatgtttgactacgagaaaaatggaaatgctgttttgaaagataatattcgctatcctcaaggtactgatccagataagatggttaagcaagttgaagaaaaatttggtgatatcttaactcaaagttttgcttcatttgaagaacctcattatgtacctggagacgatccattagttcaaaccttgctcaaagtttatgaacgccagactggtaataaaggtcatgaagtcgtgatcggcggtgggacttatgggcgtttatttaagcatggagttgcatatggcgctcaacctgaagatgctccaatggttatgcaccaagcaaatgaatatatgaaggtagatgacctaattaattcaattgcgatttatgccgaagctatctatgaattgaccaaggacgccgaataaaaatttttacatgtatcaaaaaagcttatatactgatcttgttttaatgcagtatataagctatagaaagttgctagtgtcatatatcactagtgacttttttatttttccaataaaacttcttcattatttttcttagattttagccaaaaatgatgtcccaagtaacaaatagctacaaaaggaattgtatagtacaatgctactctttgagttggatcgaaccagattaacacacaagaaagtaggcttgatataaatgcaaaatatggaattacaggataccatggggtcttgtacttcaattcactgagttgatgacctgagtttaaaaatgcccttctaaacttcaattctgaccatgcaatcgccgtccaaacgaatacaacagctaatccagaaatagaaactaatactagataaaccgtcgaggcagcaactttactagaaatcaaagcaaaaattccgtctaacatacttactactaatgacaatactggaataccacgcttattagttttggtgaatgctttaggaattgttccttcgttgcccaacgaccaaagcattttagttgaagcatacaaacctgaattggccgcagaaataattgcagtcaaaactacgaagttcataatatttgcagcaaatggcacatgaattaggtcaagcacatacacaaatgggctttgagttactccagccgtatgataaggaattaatgcggccataactacaattgagccaataaagaagataattaaacgccaaagtgttgtcctgattgcttcaggaatagctttctgaggattctctgcttcaccagccgtaatgccaataagctcagttcctgaaaaagcaaagtttactgttagcattgttgtaaatactccaccccagccgttggggaaccagccatttttataaaaattaaccaatcccaatgtgcttgataaactttgctcaactgatcaatcaaagctgttgcggtccataatttattattagtatctacgccttgtttttccaattcatacgacattgcaccatctaggactaatcccctatttttaatctgttcaagcaaacccatttttttcatgctgtcaacattattttagtaaatttcctaaataatagccgcaataaactagaaccaagccacccagatatgatgacaccgcgtagaatacaagaccacgataatttttactcttataaagctcaactaattctgtattcatagtggaaaaggttgtatagccacccattactccagttcctagtaatgcataaataaaagtgttagcaccaattccaaaaatcaagcctaaaattagtactccagttaagttaataaacaaagtcggtgtaggtaaattagaaaatttattaccaatccattcccaatgctttttaccataattagtaatagcataacgaagcatagctccaattgatgcaccaattcctgcaagcaaaaaattcatcgtgtattcctttcctttcttactaattgaccaacttttttaccaattttcattcctaacatagcaaaaaaaaagccaaaaataattgagctaaagtaataaattactgcttcgattggcaaattagcctgcatattttttaaaacatcaagattaaaagttgaaaaagtagtaaatgcacctacaaagccagtacctaatccaactacaagccactgcctaatctctttagtttcaataaaaaagtaggtgaaaaacgctaataaaaagcaacctatgacattaccccaaaaagtaccataatagctgaagtttgcatttaaaccagcacgtgccataccaccaaaaaaggcgaaaatagcgatactaatgtaattaataaattttgaattcaaacagattcctcccacaaaaaaacgtctactttacccctatcggataaagtagacgtcattagattttactcggttaatggcgaacgtcatcgcctattcagttgacagttatcatcatacgacttttctgtttggttggcaagttgtattgtgtgcgtgtcgcaaagcgacacgcagtttgattatttaataaaaaaatttagtaacaacgtgcttgaaataatgtataattatttttaacgaatgtttgaaaggagcctcaatcttgacttttccatatgaagataaatttcgcatttactgtaaacaacaaaagaaactagccgattcaactatttctctagcctgttcttcaatttcaactttttgggattattattctggtagtttagatgctactgaagcaaatgtagaaaatgttacaactggagatatacgtaactttttagattcacttgaaaataaactccatatgaaaagtaatacagtaaataaatatcttagtcacataaagatgtattttgtttttttgaatgaatatggctacatcattacttatccattgctcactttacgtggtaatcgcttcaatcgtaagcaacactatgttattggctgggaaaatcatttatcagaattaattcaaataaaaaatattcatcctgaaactatcaagatgatggctgctattgcttgtggttttaagccaaaagaaattatgattttgcatgtaaatgaattgttggtaaaagttaaagaaaatgatgtcagagaatatatccaaaatcacactaattttgccaataacgataatccctatctgtttgctcgccgcgatggcaaacattacgcttctgattttaatattaacccaaaaattgcccctgaccgttcaatagtcggcatgccattaactacacataagcttcggatgtcttatgtctactctgttttgtctaattcaaaattaagagaagcggattatattgaaaaattacatctttcaatgaaaactttaaattactatcgtaaaaatatgacactctatgtagaaaccagtaaatttgaattaaaaaaataaacaagcaaaaacgactacccattttgatatagtcctactttagtagacagtacaaatatataaaattgtactatctatgaaagcaggactttttgtatgtctagaaaaagtaaatttagctatgaagctaagcttaaagcagttaaacaatacataagtggcgaagcatcacctgcttcaattgcgaaagttttaggggctggcaagactacactgcgccaatgggtatatgcatttaaagatcatgggccagaagcattaagaccacataaatataatcaaagatacagtaaagattttaaactcaaatgcatagctgcctatttaaatggcgaaggctcatatgattatctaacaaataagtttggtttgcgaagtgctgcacagttaaagcagtgggttatcaagtataatagtcatcaagaactcaaggactacaatcctattctggaggcttatatgactaagagaaaaaagacaaccctagaagaacgtaaacagatagtgaaatactgcaaggatcatcaatggaactacaaggaagcagctcttaaatttggctgcagctatgcccaagtatacaactggtcaaaaaaatacagcgcaaagggaactgacggcttagcagataggcgcggtcatcgtttaaaagaagctgagctatctgaaactcaaaggctaaagcgtgaaattgaacagcttaaaaaagaaaatgatattaaagaccaagagatagccttcctaaaaaaagtgaaggaattagaaaggatgtgtttgctggacagccaaaacaaagacaaatagcacttaaacaacagcagcgaaattctctttacagtttgatcaaagaatgtcaccgagaatataagtggtcaattgaatggatgtgcaaacaagccaatattgcccggtcagcctactacaaatggcttaatcataagccaagcaaacgtgaactaagagatcaaaagattcttaagcgtattaaagaaatagctgagagcaataacagcctctttggttctcctaagatgactttggctttaaacaatgagctagcagacggtgaggccaaaatataccgtagaactgtggctcgcttgatgtgcgtgaatggcatctatactagcaaggccagatttaataagaggtatcgctatcaagctgctagaccggaagaaactgccgaaaatctattgcatagagacttcaatgccactaaacccaatgaaaaatggtgcactgacattactgaagaaaaaattcctggaacaagtcaaaagatttatctctgtactatctttgatctatatgatcgtttccctgttggctatgctttaagcaagcgcaatgatacagccctagttaacgctgctctgtcaactgcttggaaaagagagcccaatagtcatgcaatgcttcatagtgatcgaggatttcaatttaccaggatgccttttaagcatgagctagaagaacatggcatgccacaatcaatgtctagaattggccgctgtattgataatggcccaatggaaggctggcaaggtttaattaaagaaatgcgagaagttctttatccgaaagcaaatagctatgaagagatggaaaaagcctttaaagcaagtattgaatactatattaattatgatcctcaggagcgcttcaatggcaagagcgcaggtcaggttagaaaagaagctaagaataatccagagaatataatttcatatccaataaaacaagataaaagatataaagacttttggaaaaagattgatgaaaagaaaaatcagctcgcacaatagcgaactgattaatcaaattaatttatatatttaagctgtctacttgacacggtacggatcatttcgagtagtcgtctttgtttgttgaaggtgaaatttcaacaaatctatcttagtcagaacttggagttatctattagtaccagccatttgcttgccagaaacttttagcagcgctccaagagccatatctagatttgacataattatccgctacacgttcttggttagcagctgaataatcaccattcaaataagatgaagaaagttgatacttacctacatattggccatttctagcactgtatgagccaccagattctttgcttgcaatccatgcctttgcactagcttcggaacctgtcgcggttgatgaatatgaactagttgttgtcgtcttaggtgtgtagttcacatttgaataagtgtatgaactttgactttggctagcttgtgtagtttgttgagctggcgtttgtgtttgagtgtaggtattttcttgtctagcttgagtattttggctagtagtataattagttgccaatacccattgatttaagccaagatcataccacttctgtccctttgaatcataagcagtttttataatcttccagttagtacctgcagctagagtttgaccagttgcaactggattttcatagttattgtaaacggtagtagcttgtgtagttgtatacactgctgcatcattttgcacaacggcagcttgtgcttcattattatctagttgattgattgcaccaatacctgcaagtgataaagcagcaacagcaatagtcttagttaaaatagatttagttttcaaaaaacatctctccttaaattaaaacgtcaattactattcatcatttttgttttattattctcttgcaattgacattttatataatacctgcttcgagttgcagttccatcacagtcagatcacacaatgattaaagaaaaatgttttttcgtaacagttggaaatatttttaataaatctagatttctctgcaatatttgtaaaaatcatgcaatatatgaacaaaatttgacgacaaaataagcatccctacgccataaaagatcgttttagggatgcttatttaattaataatctaattcttgatccatacttgcaggccagccaccaataccacgtttttgatcaaggccacgcaatgtctccatctcttcagcagtaaattcaaaatcaaaaatatccaaattatccttcatgtgtaacggattcgtcgagccaggaatagtcatgatattttcttgtaccaagaagtgtaacgcaatttgtggcactgtcttattatacttctcagccaaagaaagtaaggttgggtcattaaataaagccttcattccttcaccgagtggtgaccaagattcatgtacaatattattttcaattaaatatttatgcattttcttttgttgcttaaagacagacgtttcaatttgatcaactactggcttagtatcgaaattattcataatttcatttacttgatcatggttgaagttactcagtccaattgaacgtagctttcccacctgatatgcctcctcaagtgcctggtaagtacctaaactatcagacataggccagtgaataatcattaaatcaaaatagtcttgctgggcgtgaattaacgattcatcaatcccattcttcgtctctctataaccacttgtttgcgctttagtggtcaaaaaaatgtcttcacgtttaatgccgcttttgttaatagcattgcctacttctgcttcattactgtatgcttgagcagtatcaattaaccgatatccagccttcaaagcctcgacaaccgctccttcagtaattctaggctgaattctatatgttccaaagccgaagattggagtttttacaccgttattaaaagttaaatatttcatttttattcctcaatattttattcaggatcagatgcagagtgataagtaatactaaatccagcttgatattccttacctggctccaaatgattcataccatatttgtgctctagctcaccatcagcatcttctctatctgcaattccccaccatggctcaatgcatacataattagcggtatttggatattgtgaccaaatgccaacatatggtgcatttctagtccaaacattgatgtggaacttactcttatcagttctcaaagatactttattgtcatgaccatgtaattcataaatcaaggcatcatctttaaatagctcatcacttaaaccaataaaactatcagtcgaagctagagaacgattattccagtcaagatatgctcctttaagtgggatttttaccctagcaatagatggatgcatatcgaaataataatcttctttctcttccccattatttactggtaagttaaatccagggtgaccacctacaccaaaaatcatagtttcatctgatttattaactacgctaaagttttcttccaataaattattcatcaaattatagttaactctgaattcaaatttaaatggatacatttcacgcgttttttcattatctttcagtaagaacgtgatactttcttgtgtatgattctccacttcaaaatcacaatcacgggcaaaaccatgctgacccatatgataggtcttaccttgatacttatattcatcattcttaagtcgccctacaattggaaaaagtacaggtgcatgtctgccccagatctctggatcagcttgccacatatattcttcaccggtatgagctcctttaacgctctgaacttcagctccgtgatccgaaatcactacttcgatcatattattcttgattgtgtaatccataactaaatttccctctacatatcaaacagttaaaaatcataatgtaatcgcttaattacttatattttaacattaatgcgtcaataagccagaataaaaacaaaagaaaaaagcattcaaactttgaattgaatgcttcattcgtgattctttgatcaattagagaataaatttagttaagtctttattcataataatatcgcctaacttatcttcaacataggcttcagtaactgtgatttcacccatttccatatcaggcccttcgtaaagaacgtcttctaagagcttttcaagaatagttgaaagtcgacgagcaccaatattatcagtgccttggttaacatcaaaggcaatctccgcaattttatcaacggcttcttgggtgaaaactaacttaatgccatctgccttcattaaagcaatgtattgcttaagcaatgaattttgtggatccttcaagatcttgacaaaatcgtccttggttaaagcgttaagttcaacccgaattggaaaacgtccttgaagttctggaatcaaatcactaggcttactttcagcaaaggcacctgcagcaataaacaaaatatgatcagttgaaactgggccatattttgtatttacagttgagccttcaacgattggtaaaatatctctttgaacaccttcacgagaaacttcaccagaattacgtttattaccagcaataattttatcaatttcatcaataaagataattccgttattctggcttctttcaatagcatgttgatagatagcgtcatagtcaactaacttacgtgattcttcttgaatcaaaacttcacgtgcttcttttactgataaagtacgcttaacctttttcttaggcataagatcactaagcattgagcccatatccatccccatttgacccatcatgtcactcattgggttggccttaggagcttgttctacctctatggtaacttcgtgatcttcaagtaagcctttagctagcttttcagccacatccattcgtttgtttcttacatcagcagaaacatcctcttcatgatcttcttcgcgattattttctcccatcaacatagacatcatatcttgcatttgctgcatttgattttcacgacgttcatgtttctctgctggagctaacaaacgaactaattctttatttgcttctttagttgcttgagtctttacacgagcaaattggtccttttcttccattcgtacggcttcggaaaccaagtcacggaccattgattcaacgtcacgtcctacataacctacttcagtaaacttcgttgcctctactttaacaaagggagcttctacaatatcagctaaacgacgagcaatttcagttttacctacaccagtaggaccagccattaataaattcttaggcgttacttcacgttgcatttctttagataactgcattctacggtaacggttgtaaagagctatcgcaactgattttttagcttcatcttggccaataatatattcgtttaaaattttaactatttcttttggggtcttaatagccatttccttcactcctaaatttcatcagtgacaattttatcatcagtgaaaacatcaattcctgaagcaatctttacagcttcatgtgcaatttcatcggccttcatatcttttgcgtgtcgagtcatggcaatcgctgcggcttgagcaaaattaccacctgaaccaattgcaactacgttttcatcaggttcaagtacttcaccattacctgaaattaaaagtaggtctttgtcatcaaaagcaatcaacattgcatttaatttttgtagagttggatccttacgccatgcttgagccatttccacggcagcacgacgaagatcgcctgagtagctttcgagcttgccctcaagcatatcttgaaggctgactgcatcagctacaccaccggcaaaaccaattactacacgatcatggtaaatacgacgaatcttacgcgctgttgccttggcaataactttttcgcctaaggttacttgtccatcaccggcaattgctgtttttccattaaatcttactgaacaaattgttgtcatgttaaacctcaactttctttattacgaggaaaatatttttgataatctgattttaaatgagccattgttacatgagtatagatttgcgttgctgatagactactgtgtcctaataactcttggacacttcgcaaatctgctccattattaagcatcgcggtagcaaagctatgtcgcaactcatgtgggtgtactttaccactaattcctgcctgattaaaagttttttgcattacagtttcaattccgcggctagtaatgccagttccttgattatttaaaaatacatgctgttcatcatcatttttaagtaataatggacgtgcattttctaaataagcaatcaaagatttttttgttttatcatcaaaagcaacatagcggtctttatttcctttaccgtgaaccaaaattgtctgtaagtctaaatcaagttgattcaaagtaagattactaacctcacttacccgcatccctgtcgcataaaacagttcaaacattgccaaatttctcatcgtcaaaggcttatttcctttcaatgaatcaaaaacctgctttaattcaggctggtaaaaaaattgcggtaattttttctcaccacggcgtaaagtaatacccttagttggatcgattgccactagtttgcggcgggttaaaaagcggtaaaaagaatgcaggctggacatcttgcgcaactgactactacgggctaacttgcgttctgctaaatgttgtagataaacctggatatcacgttctcttactttagtccaacctgggaatccaccattttcatgccaaaacctttccgcttcatgcaaatctgtttgataagctaaaacggttttcgcactataatgacgctcattttgtaaatatgataaaaattgatctaactcactttgcctttggttcattaatctaaaacttccgtcttaaattcatctaaactagcaagaccacgttcactgaccttctcatggcgctcacgcttcttgcgaatcttcttaccctctagtggaggtagcaaagcaaaactagcattcattggttggaaatgtttagcactcgtagtagttatgtagttagccattgagcctaacgcagtatcttttgggaaagccacagtatctttccccatagcttcacgtgctgcattaattcctgctactaagccactacctgcactttctacatagccttcaacacctgtcatctggcctgcaaaaaataatccaggctgctcttttgcctcgtaagaagctgtcaaaacttctggtgaagccatataagtattacgatgcattttaccataacgaacgaaacgtgcattttctaagcctgggatcattgaaaatactcgtttttgttcaccaaatttcaaatgagtttggaaaccaacaatattatacattgaagctgcagcattatcttggcgcaactgtacaactgcataaggagttttgcctgtatgtggatcttctaatcctactggtttaagtggaccaaaaagcattgttttagccccacgcgctgccattacttcaattggcatacacccctcaaaaacatcgctattttcaaaaccatgtaattgcgcagtttcagcgttaattaattcctgactaaacttttcatattgctctttagtcataggacaattcaaatatgcagcttcaccacgatcataacgcgactttttataaacaattttcatatcaatcgagtcagcggccacaatcggagctgctgcatcaaagaaatgtaaactatcagttccagaaaatttttgaatctgtccagctaaagcatcactagttaacggaccagttgcaataattgtaatcccatctttcggaatttcagtaacttcttcttcgtgaacagttacattctctaacccacgcaaagtgtcagttacgtatttactgaaactatcacgatcaacggctaatgctccacctgcaggcacttgagttttgtcggcagctttcatgatcaatgaatctaaatgacgcatttcttcttttaaaagacctacagcattagataattgatttgatctcattgaattggtacaaaccagttccgcaaattcaccagtttcatgagctggagtctccttttttggtcgcatttcataaaggtcaacatgaataccacgcttagctaattgccaagttgcttcactaccagcaagacctgcaccaataactgttacattttttggcatttactcacctatattttctatgttaattgtttttttcgttttcactgtcttcacgataatcaccgttaggacaaagaatcactggaccttttttagaatgcttttctactaaaaagtggccatcatttggacaatttctgccaattggcttgtcccatgagacaaagtcgcattctggataacgagaacagccgtagaatttacgatttctacgtgatttcttttcgacaacctgacctttgccacattttggacaaactacaccgatttctttaatgattggcttagtattacgacaatctgggaaacgagaacaagcatagaacttgccatagcgtcccatcttaatcaccattggtgcaccacaaatatcacaattaaagccagctggttcatccttgatttgtaccttttcgatttcactatcagccttatttaattctttcttaaacggttgatagtattcgtcaacaacatgaacccaatcctttttaccatcttcgacttcatccaattcattttcaagtcgggcggtgtaatcaacatcagtaatatctgggaagaagctttcaattaagccatcaacaatttcacctaattcagttggtacaattgaacgaccatcaagtttaacataatagcggcgttgaattgtatctattgtaggtgcataagttgaaggacggcccacgccattttcttccaatgcgtgaactaatgatgcttcagtatagcgtgctggtggtaacgtaaagtgctgtttgttatcggacttagtcatcttgaccttgtcaccctcttcaagatcaggtaagtcaacattcttttcttgttgattatcataaaccttggtgaaaccagcaaatttcaatttagaaccagtagttctaaaaatcacaccattttgaacaatatctgcacgaacagtatcataaacagctggggtcatttcactggccaaaaaacgtgaccaaatcaatttgtataaacgatattgttccgtagttaggacactctttaatgactccggtgtgcgatatacagatgttgggcgaatggcctcgtgagcatcttgtgcgtcttcttgattcttaaaatggcgttgactcttagctgcaaattctgcaccataattttcatgcaaaaacttagaagcctcttgttgggcaactggtgatgttctcttagagtcagttctcatataagtaatcaaaccaactgttccttgcttacctaaagaaatcccttcatataattgctgagcaatactcatagttctacgagtacgataacctaaacgcttattggcttcttgctgcattgtagaagttgtaaatggggctgctggctgacgccgacgttgccgagcaacaactttatctactacaaagtcctttttcttatcgattttagccaaaacatccttaacagaatcgatattaggcaattctttctttttgccatcaacaccataaaaggcagatttaaaagtttctttacccttagcaaattccgcatcaattgaccaatattcttttggcttaaagttcttgatctccttttcacgatcaatcactaattttaaggcaactgattgtacacgtcctgcagataaaccttttttaactttggcccaaagaattggtgaaagtgaataccctacaattcgatcaagtacacgtcttgcctgttgggcatcaaccgtatccatatcaattgtccggggatgcttgaagctttctttaactgcatccttggtaacttcgttaaaagttactctattcttggctttttcgtcaagattcaatgcgtgcgctacgtgccaagcaattgcttcgccttcacgatcggggtcggatgctaaataaacatccttagccttcttggcttcgctttttaattctttaatggtatcgcctttaccacgaatggaaatatacttaggcttatagtcgtcttcaaagtcgattcccatttgtgacttaggcaaatcacgaatatgccccttggaagcaataacgtgatagtttcttcctaaatatttttcaatagtcttagcttttgcaggtgattccacaatgactaaggtctttttacgtttttttgttgttttacttttcgctttagtaggcattaactgcctccttaattcttattttattttatgggtacagtccaaaaataactaatactttctgaattgtcaaatctttatcttgttaaatttaaaatcaacaattggcgtagctcctgcttcaattaattgattgggacctgcagacaatgcattagtaattggtccaggtactgcataaatatcgcgattttcttgtaacgctaaattagcagtaatcagtgaacccgacttttctttagcctcagtaacgattatgctttgacttaagccggccaagatacggttgcgttcaggaaaacgatacggacgcggtggtgtatcaggcaaatattcactaatcaatagtcccttttgcacaatctcttcttgtaaagcaaaattttgcattggatatgaaaaatttaaaccattgccaataaccgcaattgtttttccttggttgaaaagtgcagccttatgagctaaggcatcaacgccttttgctaagccacttgctacaacctgaccagattgcacaatattaggtaccaagcgattaataacatcttgactatacttagtcggatagcgtgagccaacaattgtaatgatttctttttgcagtaaagaaatatctcctcgggtaaacaataccataggtggtcgataaatttgacgtagtttttctggatatgcttcatcgaaaaaactgattacgtcacactgctgttcaatttgttgtaccattcgatccaactgatcatcctgaaaagcgcgatagcatgcatccattagttcctcagttaattcaatttgttctaattcttcaaattcaatttctgtttcatcagttacctgattagcaattgtcagcaatttaacataaccaatccctttttgcaattttaattttagtagaaattctgtttttttcataaaaaaagccctccactatttattacgcaaaaagagaccattatttttttataaattgaaatttattcaaaaaaatcactgactggagcaaatgttttgcggtgaattggcgtagggccatactttttcaaggcttcaatgtgctccttggtgccgtatcctgcattatgatgaaagcaatattgagggtatattctatcataatcatccatcaattgatctcgaaagaccttggccacaattgaagctgccgcaattgaattcgacttagcatctcccttaatcaatttaacttggggtagatttactggcacattcattgcatctaccaaaagtgcattcggcttaacatcaagtgctcgtactgcttgagccatcgcttgacggtcagcttcataaatattaatttgatcgattacctctgcactttttactccaataccaacactaactgcttccgctaaaattttaggatataacttcaatcgtttctctgggctcaatttcttcgagtcgtttacatctaataaatcaaaatcttgatcaattatcacagcagcagttactaccggtccagctaaagggccacgtcctacctcatcaacacccgctactaattgtcccttttcccagaactttttttcataagaaaagcgacgcaaaaactcttctttttttgctagtaattttgcttgacgcttacgataactaactaacaatttttgtacgccggcccgcggatctgcctcaagttcgttaatttgggcttcagagacctcagatttcaacagctcttttatttctttaattgtcatggtctatctaacgtaatccttccgattgcacccttacgcaatttttgtaacataaataatgaaaaacgatcataatcatcacgcatgccatatttttcagtcattgacaaaagcaaatctggatcagccatatcagcaatttgctgttcaggtaatttagaaaatttaagcaaatccttagcataaaattcacgtaaatttttcaaaacaaataatgctacatcatctgcatgaaaaacactatccttaattgcaccgaaagcagctaatttataaccaacttcctgatcagaaaatttaggccataaaatccctggtgtatcgagcacttgaatattagcatttgttttcagccatctttgtcccttagttacacctggtttgttaccgacttcagccacgttccgaccaactaaacgattaatcaccgttgacttgccacagttaggaatacctgccaaagcaattctaatagtaggatttgaggcccctcgtgcttctagcttctctgttttggcagctgccgccttttttactaaggaaaccaacttctgcatattagtattgtgcaaggagtcaagtgccaaaacatacttattatctccagctaattctgctgcccatgcctttgttaaaactggatcagctaaatcagccttatttaagataataatatgtggtttattaccaactagtccttcaatcattggatttcttgaagcttgcggaattcgggcatcaagtacttccaccaaaacatcaatcagtcctaacttatcttccagttgattacgagccttgttcatatgccccggataccattgaattgttgccatattatctcttctttctaaaattaatcattttcatcatctaagaacaccacttctgacatcaaaatctgtctatataaagccagaaagcctcgacgatattttctctcttgttgtgcaattttacctaaatagtcacgttcttgtctaaaagcatatctatatacctcagctctaaattctttctgatcatcgggtaattctttttgtttaattgtatactttatttccctagcaaaatcaaccatagaagtttgattcatttgtgcccttaaatcgaattttaattgttttcgaatctttttaggtaaatagatctttttcatttgatccatagcatactcaatcattgccacacgaactcgatcaacttcctttctttgatcaaaatcaggtatatctttgtccaagatcatgtgaaaaacaattgttggaacaatcatacttagtaaaataagcgtaatttcactcaccaaaattaaatggaaatctgctacattaatacgtaaatcatataacgtatatgctaaagcaaaagtaactgctccatgaatgccacccagactaaaaatcaatgcttctttattactcgtttttcctttaatagaagggctaaatcgataataaaagtatctaataagcaaattagctaggtataaaattattccgatcaaaatcgcatcaattgtttgttgattaaaatgtcttccctcattgaccgaacaatgatgattcccaaaagcaaaaagacaatcccatttaaaatatcaatcagaagttgcgataattgattactgttataaaaaataaaggcattagtaagcctgcttcgctcagattcaacgttatgaatcaatccggctgcaacgactgcaataattccagaaacgtgaatttcttctgctaaaaaatatattattaacggtgtcaaaaagaatatgacatcaaccggcattgcaacaccagcagataaatgatatttggagcgaaaactttcctgacgcaagaaaactaataaagtagccaccaaagctcctagaaaaaacctccacctgcagaatataaaaaattacctattgcttgtccaatccgtaattcttgatgcaagtaccaatcaactgccatattaagcaaaatgatacctgaagcgtcattaaacaaagactcatcttttaggtaaaaagcaatcttcttaggcagcttcaatccatgtgttacagattctgttgctgtagcatctgttggcgttgaaattgcagccagaataaaagccagtggtagagagacccatactaaaatagatcccgaatcccgcagttatagttgccaagataatcataataaccgttaacccaactattgcgccccacgaacgtaaaacattatacaacctagtacgttgtccctcaaaaaatagtaatggcgctacaatcaagcccataaataattccgagctaaagtcctcaattaatgaattagtttgtggtactagtgcaatagccgctccaatcgccattgcaatgtaattaactgatattctcttcaaaaagcgttgttgaataatcgtcgcaaatgctaccgcaaagacaataaaaccaataaaaattactacctgcatttttctacccacttaataaaaaagcccaggcatctatcaggcttgggcttaatacatcattttgtcttcatacattcgataagcacgatcaaaaattgacatacttggtaaataactagcattcaattccaaataatctgacaatttctcataatcttgttcttgcttaggaaaagtcaggtcatgctgtgcattattcgcaaattgagctacgtcatcagctgaatctgcatccctttgcgtcattaaatatcgataaaaactttctcggtaagccataattactccacataatataagatcgcataagcaccattgccagcatgtgttgcgataattggacttgtctctgccactaaaacattaatcgcaggattgattgcacgaattttttcagctaattcttccattaattcaggtgtatcaacgtacgaaatgcctacttctttaatatgctctttattatctgcgatttcttttaacactcgttcatcaaaagcacgtgtaaatttcttacctcgtccttttttggctacgattaacttaccttgtggcatctgaagagcgattctaatattaagcatagtagcaattcgaccagaaagtgcacctaaacggccacccttgattaagttttgtaaattaactaccatcatttccagtttttgagtactacgaatctttttaacatgatcaataatctcagccatgcttttaccagcctgagcatccttagcagcagccaaaacttggaagccttctgccctgtcggttagttcagagtcaataattgtaacattatcgctttgacctgcaatttctgcagcttgacgagcggcatctatcgtaccacttaatgatttagctaagaaaataccaatcacttgactgccatctgcggttaattttttaatcacatcaacaaaacggccaattggtggctgactagtcttaggtaagctctccgcttcattcatcttcttgacaaaatcacttctagtgatatcaatcccatccacatatgacttaccgtcgatggtaatcgtcaatgggactactgtaatgtcatatttttcaacttcttctggtgttaattggacggaagagtccgtcataacttttatcttcgacaacgtattcgccttcaattctaatttgtttacccgatttatgataaaatgtaagcaacatatatactgtattgtatcaaaaaactattagaagaaaaaaggattgattacacttcatgaaaattagcaaactttggcagcaaccagaacaacgatcagaaaggtactaccttctagataatatttttagtgccataactcatgggattggtttcggactagcagttaccggcttagtaattttaattgtaaaggcagctcatacaggcagcccgatgcgagttgttactttcacaatttatggctcttgcctggtactgctttatttattttccacactatatcacagtttagtttttacacgggccaaaaatatttttcaaatttttgaccattcctcaatctttcttttgattgcaggatcttatactccatattcacttgttgcaattggtggagcctgggggtggactttatttggcttgatctggggcctaaccatctttggcatcatttactacatcttcaatcgtggtaaacacgtcatacttgatacaatcctctatgttgcaatgggatggttagttatcttgtcaggatcttatttatatgttcgcttaagtccaactggattctggctattagttagtggtggcattgcttacacaatcggcgcgattctgttcagtatgcgcaatgttccctttatccatactatctggcatttatttgttatgctcggttcaatcttaatgtacttttccgttttactttatgtttaaaaaatgtagcagttgaattctgctacatttttctttctattcaattgtagtcaaatagctttcaatcgcttcttgattattctcaacttcacctgaaacaactaactctcgaattttattcaaagtctgccccaattttgcacctggtcgcatcccgcgatctattaaaaatctcccatcaacggctagttccgacgcttttttaataggtaaagccatataacgatcaactaaagcttctgaagaaattggttgaccaacaatatgagcaacgtcaatcgtattaattaatgtctcttcccctgctaagaataattcataatcactaggagcatgactagaaagtaaatcaaatagattaataattctttcgacttgctcagtcatagcattagagtttttccagtcacgcataaaacgatgaatttgttcattcggtaatttcaatagcaaaattatcagtgaccacaaactattttccatcgttggactgaattttaactgtgggaaaatagctagttgatctttttttccgccaaaatcaggtacatcttcactcaaatttgtatcaagaaaaacctgaaaagcttgccgagcatgtggtcctaaacctaattttacaaattcttctcgaattcgttcaactgaaatttttttaagtaatttatgattatccttaattgcctgttgagtcttgctttctaacttaaattcaagttgactcataaaacgtacggcccgcatcattcgcaaagcatcctcgtgaaatcttttttctggatcacctacagcacgaatgacatggtttttgagatcatctagtccgttaaataagtcaacaatttgccctcgtgtatccattgccagagcgttaatcgtaaagtctctacgctttaaatcttcatctaagttttgaacaaatgttacatgatctggacgacgaaaatcttgataacccgattctgttctaaaagtggtaatctcataactttcaccaccataaaggacagtcaccgttccatgtttaattcctgtatcaattgacttatcaaataactcttttacctcttctggataagcactagtagtaatgtctacatcatgaacatgacgatgtaacaaaacatcgcggacagaaccacccacaaagtacgcttcaaagcctgcattttctaatatctgtaacacgggcattgccttggtaaaaatttctggtaaattatctatctttatcatattaaaatctcaattcttattgtctttattattacttttgctatacactttgttaaaattgaggaaagacataaaggaggtaatcattatgcgtaagattgacaaaagtatcttaattgatatcctcatgatcgcgctaggctgtgctatttacgctttaagtctagacatgatttctgtccccaataaactagccgacggcggactaagtggtatttcacttcttctgcggcatttttggggcatcaacatgggactatcgacccttgtattgaatattccactaattttgttaggctatcgctttatgggcaaacgtcttttagcctatacaatctggggaacgctcagtctttcctttttcttatggttttggcattcagtacctattataaaacaattagatttagaacacgacctcttcctttcagcaatttctgctgggttattgtctggaatcggattagggttagtatttagatataatggtacttccggtggaactgatattattgcccgaatctgtcagataaaatttggtatttcgtctggcaaaatgcttttagcttgtgatgcaatagtactcttcgcatccctatcttacctagacatcaagcatatgctatacacattattagcttcttttgtcttatcccgagtaatggataccgttcagcaaggtgcatacacagcccgtggtttattaattatctctgacaaatatgaacaaattggcaagatgattgatttaaaactaaatcgtggtttcacatatctaaaagctttaggtggctatcaacaaaatgaaaaacgtgtaatttatgttgtagtcgcaccgcgggaaattccatcaatcaaagctttaatcaagcaagaagatccacatgcttttgtttcaataattgagataaatgaggcaatgggagaaggatttacttataaaaaaccacatcgctttttcatccacaagtaaaaagctataccatgatgcatttcatgatatagcttttcttttactaataattaataattacagtcaatacgttattagctttaacgtattcgttttctccaatttgaatgaatggccgttcatcaatttctttatggccaagatttttaactttagagccttgtttaacaaacttacctggaattggctgaccatttttatcataaacatatgatggatgcttaatgcggttaattgtctcggctgtgtccttaatgtatggtaaaaatgccccttccttaacgaatttattcttaccaatcttcacaaaattattgccattaattgatttaatgcctaggatcttgtaaacacggcccttttttaaatgtccaactttttctcctttacggttaaaaatcgttgcttttctagtcaagtttaactttttaccctgacgaattggattagttgtagctgcgttaactgtctgagcagtcatcgcacctaaacttaaggaggctaagactactcctgccatatacataatttttttgttcatcatgatctcatcccctaatcattacttaatcttcttacctatattttaacaaaaaatgcagaggttatacacttttctctatttttatttatgggatggataacacttattctttgcaatctttcatggcaagaactaatcttagcttgtaagcgtttgtcaatatcaagcaatcaagaggatgaaaacaatgccaaaaaacagttactcccaagaagctttcgttcatgtctatttacttcttgggaattaatggggtaattgggtccggtgcctttttaatacctcaaacaatctataaagatatgaacttgatgagtgttttcataacaatttgtgctgctcttacagtaagtatggttactctttgttatgctgacttgtcaagtcgttttactggatcaggcgcagcttggctttattcatatcacgcctttgggcgatttactggctacgaacttggaatatatacttggtttttaggatgctgtacatatgcggcagaaatagtagctttgttaactattttaaagactttgtcccctgtttttagtaatcacgctgttcactacgggatagctattggaataattgtgctaattgtgctgtttacgattattaacttatttggtcggacaattgtaaaattagtcgataacttatcctctgctgccaaaatgattactattctgatttttatcatcattggtgccttttttattcataaaatgaactttacacctgtgattcctaaagcagcaaccctaggtgttggtccttacttcaaacattttggtgctgcatttagtgtagtattttacatgtttactggattctcctttattccgattgccccaaaacagatgaataatccagagaaaaatattcccaaagtattgatctcagtgatgatcactgtgactattttatatgcattaatgatgttagtagctatcgggattttaggatccaagatggttaattacagtacgcctattgctgtagcctttcaaaaggccgttggtgattggggctacgttctagtgattgcagggatgctgattagtgttatcggcgttgcttttgcaggatctttcaatactccatcgttgattgcttctcttgactccatcgttgattgcttctcttgctaatgagcacgcaatgttacctaaatggattggaaaaaagaacaagcatgatgctgcttgggtagctattttactcagtgcaatcatcactatgattttaatcacacaatcatacctcttcttggtatcttgcattgtattggcttcatttattcaatatgtaccatctatcttagcagtaatcaaattcaagcatactaatgaatttccaaataacggttttaagctcccattcggctatgttattccagctttggcattaattatttcatgctacatggtaaccaatttcacttggaaaactattttggtcggaatagtcgtaggggtattagccgcagtagcttacttcttcattgaaaaagatgaagaaaagcatcaaaagtatttgtcaaaaatgcgtaataaataattttcaagttataaggacgatgactagaaactgtcaaatcttttgtgtaaatagttctttctcgtaaattgattttttaattatttatttaatcaaagtaggattctaaggtgtcctgaacctgaccaaagcctttatgaattcgattgaaataacggtcattgtagctcattgcctgaataccaataaaagcatcaagcgactgttcagttggaaactctgccttaggcttagctttgcgcttgatcacattgttaaatgattcaatcatgttagtcgaataaattgaagctctgatctgcttgggatagttataaaagaccagcagatctggttctatgtctttcaagcttctgataacatggctgtaaaccttgccccatttggtatagaagtcatgcaggacagctgtggcttcttctttgtttgtctgttgatgcacctgtttgaattcgttcatgatcttttcacgatcgtcgacgcgtactttagcgcagatattgcgcatgacatgaaccaaacagcgttgaaaatgagctttaggataagtcctggccaaggctgttttcatgccaacaacaccatcagaaagaaaaagctcaacttgctttaagcctcgggatttcatgttttgaagcatatctgtccagacttcaatgttctcgctaggtgcaatgcagtagtcaatgacctccttgtgcccattaggcttgatgccaatggcaatatagactgcttcacgctcaaatgtttctcggcgcaaaggaaggtatgtcgcatccaaatagacgcagaaaaacttgtcgcttagcttgcgtttgtggtaagcctcaacctttggaatcatctgcttggaaatatttgatacctgagctggactgtaatggctgccatacatcttttcaattagatcggctatttccctggtggtcacgcccttggagtaaagcttgataatcatgctttccaagatatccgagtgctgcttgtagccaggcagcgtgtgctgatgaaattgaccgttgcgatcccgaggcacttgcacttcaattgggccaaattgcgtatcaactttgcggaaataagcaccatttctagagttgccagtattccagccatttctggcatagggatcatagcccagaaaggcagtcaattcagcttctaacaagttattaacagcctgttgtagctctttgcgcaataaatcatttattttgtctggattgaatagagcttgagcaaaatctttggtaaaatcattcatgaaggagttcttctttctgtatgtgtttttttgttcaaaccaatcatacgagaaaggaactcctttttctaatgtttaaagaaataaatttaaggaatcattcatccttacacaaactattttacagtctcgatgactatccaatatcgcccttattttttgatcaattaagactttttagtctgcttttaaatctatttttcaacttatacattatgaaagcccatctcctcttaataatatttagtgctaaactgttagatagattagtattagaaaagagcaacaacaaatgagtaatcagaaagctaaaataaataataccgaaattaaaactagagtatctcacttcagaccaagccagtaaaaaaattcaagttaacataaaaggaaaaccatatgtctgaagagataattaacacagtcacaacaaaaaatgattttaagagtgcattaagaaatgcgggtattaaagatgatgataccgtattagttcatactgcactaagtaaattctattacgttcctaatggtccagaaaccattgtcgaagccttaaaagaagctgtgcctaatggaacaataatgatgccctcacaagtttctacgaattgtgatccagccacttgggaatatccaccagtacaaaaatctttgattcaagtagttaaggatgctatgccaccttataatcctacaacatcaatgacagaaggcttaggggttacgccagagtatttcagaactttgccagatgttgttcgaagtacccatccttacttgccaattgctatttggggcaaaaacaaagtaaagattgcacagaatcaacctttaaatattccttatggaattgacagtcctttagattatttgtaccagaataatggcaaaactatctttttaggcactgattatgaaacgtgtacagttttgcactatgcagaatccacaattggtagaaaaaccgaaacatgttctgctgcaactagtctggatgaaagcggcaaaactatttggactgaatatcaaaatattgatatggattcatatgatgactttaatgaattagggacagagtttgaagcaaagcatccctctgctatcaaaaaggttaagttaaacaatggtgtcatcaaagcaataaatgtaaaaccgctaattgattttgctagaaaatggtttataaaaaaagacaataatcattcaatttaataataaaaggaagaagtcactttcaacttcttcctttttctttatttaatctttgttaaaacctttgcacctatatttaaacctacactatgcgatttaccgccccaatcacgttcatcataattatccatatcagctaaagtatctgcagtgaaaagaaattgtgcaaaatcaatctttctaaactgagcacatgctgctaaagctgcacattccatttctacagttgacgcgcctaactgacgaaattgtgccacttttttaggcgtttctctaaagaaaccatctgttgtccaagtcgttatctcgtcatattctatatttagctcaactaaaatcttttctacttccttcaaaaatatagaatctagttccacaagttgtccaggattcatatagtgaaaagatgtcccttcatctcgaattgcacgtgttggaagtagcatcgcattttcaggtaaatctactaaggcacctgctgttccaatggttaacaccttttctactccataagcaattagccattcaagcaactgtacagctgccggtgctcccaagggcgcttgacacaaagtgaaaaattcgttattaatttgaacttcataaattttaggattaaaagaacatgactcaaattcacctaaagtacggtgaaaatggtgatctaaaaatgcattaatttctttttccggcacgaatgcgtaaagcaatcttggatgaaaatgaaatggttcttgatcgtgatttggttcaagaaccgcatgaggatgtttgtcaaagtctaaaatgaatggttgtttgttcatattttacactccatttttagttgaaatattatcataaactcgctaatacctgagatccaatattcaagctaacgctatatgaatcatggccccagttacgtttatcatagttatccatatcagctaaactatcggcagtaaacaaaatttgtgcaaaacttatatttctaaattctgcacaagcagctaaagctgagcactccatttctacagtttttgcacctagttttttagcttgcaaaacttgattaggtgtttctctaaaaaatccatctgttgtccaagttgttccctcttcatattggaaacctaaattttttatttcattctcaactcttcttacaaaatttttatctaatgcaataatcttacttggttctttgtagtaaaaagatgtcccctctccgcgaatcgcttcttgagggacaaacatcgtgttttcaggtagattatccaaagctcctgcgtttccaacagataaaacttgtttaactccataattgatcaaccagtctaaaaactttgttgaagctggtgctcccactggagcttgacataacgtaattagttgattattgacttccacttcatatattttaggtctaaacgaaacagttttaaatttgcccagagtcttatgagagtgtttatctaaaaacgagttaatttcatcatctgggacaaatgcaaaaagcaatttttcatgaaacttatactctaaattttcgactccaggttctattacagcttttttacttaaatcaatatctaaaacaaatgatccttcattcatatacgcgtggtgctagttaaatcgttctagacaataagccaaattataagctaaaattgcaatttccaaccggctttgaaagcctatcagactacgtgctcgattgttctcggcattgtaataggtcagaagcgaaaagtcgctttcaattgttctgcgaatagccatcaattgatgatcattgtgctttttagctcctgtcatatttttacgatatggtgtccaaagttcgtaacccatttgttttagctgttgatgcagttctttgcctaaatagccttcgtcgccaagaagatagtaattagatggatgggtattttctatcagttcaactgtctccctggcatcatgaactgatgcctttgttacgacataatcaagaatgtaaccgtcatcgctaacaatggcatgaactttgaaaccatagaagtaaattttcttggtggccttataaccaatgttggcataaccgcgaaaaattttagcacgatagtttcgaattggttggcaaacaggtaccggaaagctgtcaatgatcaagaactgtccattcaggtcaacctttttattcatttcttgccgtatctgataaatcaattgcaatagctgacgtgaacgccgattaaaacgtgagtgtgataaacaattgaaacattcacagaatcttctttgtgattcaattcctgtcttagcttgccagataagtaaagccaaaatcagactgtccgtagttttaatttgatcaatatttcgccgatgagtaaactcagccggtgcatacaaacgataccagtgccgacaaattatcactaaatctttaaaactaacttgtaaatggtggctaaaacgcttaagcttaaggcagttcaatcagatcagactcttttctattattactatttacaagtcgagtctaacaagattggacttttttattaactaaaacgatttaactagcaccacgcgtattcatatatattctcccttaatcaataaatggatagtcttcattaaagtaatgatcaataaaaatttgatgttgcttgttaaaaatcttggataatttatctttagaaaaatacttcagatcaagagtttcagagctaatctcttttgacattttttctactaattcaacagttactgcctgtgccacatcttgattaggataatgctggataaaattagttgaaacgcctaatagtgacttagttcttacttttaagccagtttcttctaaaaattctcgaacgcatgcttttggagctgattctccaaattctaaagcaccaccaggtaagccccatgcattaaaatctgatcttttttgaagtaagatttcattcttgctattagccaaaattccaccagcaaaatttagaataattggttcatgaccaactttttggcgtaaggtcttaatatagtttttaaccatcgctagtcctctacttgaatatcattcatcacaatttcaacttcatcgtctaaattaatctgactagtaaaagcatactcgggaataaaaccaagataatctttttcattccaccatgagcgcattgtttcttcaccaaaagaatgttcatgacgagttttatggcgtttcattgtttcttcaaacggaatatcaaaataataggcataaatttgatcaccaaaaagctgctgagattttttgaataaatcagcataccatttcgcattcaagataccttctaaaatagtgtaagaacagtgatgataaccatactcaagcaagttttctaataatggcaaagcaaatgtcttttctccgtctttaacattcagcatttctcttctaactgtatcttgtggaatcaatagtgtattgtgtggcaatcgacgatggatttctttagacagtgtagttttgccactgccagagtttcctcgaattataattaattttgatgtcatcatagaaatcttcactttcttaaaattaattcactgcatctctaattgttgcaaacttatcaaatgtataatctattataatctataccatgaattttaacaataggcagcattttccctttttgtcccatcaataatcctgcagaagcggctagcatgtcacagatagtttcaacattagttttatcttgatactgactttttcttaaaccagaaacaccatacaatccaattgctacttgagttgcaccttttttatcaattcttccatcactatcggtaattatgatagctactctgacttttaattgatcaaaaatatcatcactaattctcttagcaatttcatcacaatttttaggtaaaactattgcagtaccagcatcaattttatctacacctgcactagttaaaaacaaaccattcggcaaccacccaccaataaagttcttagatatctttagtttcttaccactcttatcttcggtttgatcaattataatctgaattagtcttggagcttttctaggtatttgctgatgcaaacgtaaggctaattgacttggattaatagaatttaagtgaacaaacagaccttcagatttagaaatcaatttagaagcaatacataaaacatcattatcgcgtatattaaatccttcatttttgattgtcctaattatttctgcacttaagttgcactttctctctattttcggaaaattatgcagcgcttcaattgtaatcatgactataacctcaaatcagatgttaatttgcccaaaacagtaatttcgtttctatcgcaatacttcaatgtttttatgatcggttaccatgatttatctggtatctttctcctttattaatggtattgttagcaaaacaacaccaaaatacactgcggatacaaaaaaacattacttttaagtctccaaatactttcataatactattgcttataaataatgaaatactaaccaagatctctgcaataaatgaaacagttgaaagcatagtcgacttattgctttctccataaatggcttcattactagtagctgaaatttgtcccgacatcattcccatcaatagttcaattaatagaaaaaggcaaagcagtaaatatttattttttagagtaccacttaatataaatgctccaatcatacttccagtattcaacaaagtaatcccttttgaattaaaggaagtagaaattttactaaataaaatcgaacctagaattaatgcacacataaataatgtataaactagtgaaagattaaagcctaatttttcaacataaataatcgaccagtagataaggataaactgcgttccacaatcataacccacattcagcaacaacaaaatccagaaatttctttttctaaaaaagccaacaatatttttaatattatatttatctttctttttactagaagccctattatctgaaaagataagaaacttgtcataagccaaataaaggctggatataacacaagtccaagcattgcgaaccatattagtgcagtatctttaattccaaatagccaagtcccaatatttccaccgattaatgtggttaaattcaaaataattatttgcatccccattagtttgctactaggggcaattttattttgttcctgtaagtcagttacataggcaagtaaagtacctgaattaagagctaagccaataccatataaaagctctgccgctgaaaagaaaaagaagtttctaaatagaattagaatgaaaaaactcgtggcaataactaaagatgataaagctaaaactttcaatcttccaattctatcagctaaatatcctgctggaagaagaccaaatacaataccgatattttgaaaagattttattgaaccaatatttgcatccgggattccatttttagcataaaataatgaaaaaattcctgacattgatgatcggaaaagtgtaaaaactgctgtaaaaactaaaaataaaattgcaattttaaaacttacactttttagcctcatgatcatcaactcctattattttttaagagactgtaaaatagtttgtgtaaggatgaatgattccttaaatttatttctttaaacattagaaaaaggagttcctttctcgtatgattggtttgaacaaaaaaacacatacagaaagaagaactccttcatgaatgattttaccaaagattttgctcaagctctattcaatccagacaaaataaatgatttattgcgcaaagagctacaacaggctgttaataacttgttagaagctgaattgactgcctttctgggctatgatccctatgccagaaatggctggaatactggcaactctagaaatggtgcttatttccgcaaagttgatacgcaatttggcccaattgaagtgcaagtgcctcgggatcgcaacggtcaatttcatcagcacacgctgcctggctacaagcagcactcggatatcttggaaagcatgattatcaagctttactccaagggcgtgaccaccagggaaatagccgatctaattgaaaagatgtatggcagccattacagtccagctcaggtatcaaatatttccaagcagatgattccaaaggttgaggcttaccacaaacgcaagctaagcgacaagtttttctgcgtctatttggatgcgacataccttcctttgcgccgagaaacatttgagcgtgaagcagtctatattgccattggcatcaagcctaatgggcacaaggaggtcattgactactgcattgcacctagcgagaacattgaagtctggacagatatgcttcaaaacatgaaatcccgaggcttaaagcaagttgagctttttctttctgatggtgttgttggcatgaaaacagccttggccaggacttatcctaaagctcattttcaacgctgtttggttcatgtcatgcgcaatatctgcgctaaagtacgcgtcgacgatcgtgaaaagatcatgaacgaattcaaacaggtgcatcaacagacaaacaaagaagaagccacagctgtcctgcatgacttctataccaaatggggcaaggtttacagccatgttatcagaagcttgaaagacatagaaccagatctgctggtcttttataactatcccaagcagatcagagcttcaatttattcgactaacatgattgaatcatttaacaatgtgatcaagcgcaaagctaagcctaaggcagagtttccaactgaacagtcgcttgatgcttttattggcattcaggcaatgagctacaatgaccgttatttcaatcgaattcataaaggctttggtcaggttcaggacaccttagaatcctactttgattaaataaataattaaaaaatcaatttacgagaaagatctatttacacaaaagatttgacagtttcttttttaagatctataacctctttaactatttctgcaatttgttttggatattcaaaatgtatatagtgagattcgcctaatgttataactttagatttaggattatttgaagtgtattctgaccgcttatattcattttcacgatacttttctgtaataacaatacttggtgttttatcacttatcctggtagtatttttccaaaacgaatcattttcgtaggctgcttgtgcgtttaaattatccttttcatcaaatttcttcgcattttgctctgtagttgtccaaaactttttattttcttctggagtaaaaatttctctaagatcagcttcaattttttcttgaagttttgccatgtttttatttttctcaatataagctggttcctttggaggatttaacatgatttctctagtagttggctcaattcctacaaaagccttcaaattattgattttatctttcatttgcatagcatacacaccgccaatgctatgagccaaaattataactttttttgcattaaaatcgttaataattttagctaatttagtagcttcgtctgatactgtatagtcctttaaagacttgccactaaagccactattcaaataatctgatgcaaaatagccatacttattgggcaaagcttcaattacttttgaaaaagattgtgctgtatcaaaactaccaaagccattcaaaaaaacaactaatggatctccctttcgataggcaaaattaatcttgcctaattcagtttcaatatcgcttctttgcataaatttctccctttattaaaactttgaagtcgttatattttaattatttcttagcacaaataccttatgcccattttcatcatcttttaaatacacgaatcagcttctagcaatttattaacagcctgttgtagctctttgcgcaataaatcatttattttgtctggattgaatagagcttgagcaaaatctttggtaaaatcattcatgaaggagttcttctttctgtatgtgtttttttgttcaaaccaatcatacgagaaaggaactcctttttctaatgtttaaagaaataaatttaaggaatcattcatccttacacaaactattttacagtctcgcctgcggcatcatatcttgaatctgcttcttggcccgctttaatatttttcccggccatttttaccaaattgcccacctgcatatggctaatattaaagccagacaggcaattgactgctagagcagtattgcgataagtggcaacgctgcttacttctaagatgtttttgactgctaaaatactgtagcgcttgtatttgtcaaagcccattaattcatccaagggataccttgcttgtttgcctgggcagacatatcttcttctgacatacctaacttcgccaaaagccatattgattgagcgctcattcttcttatcaatctgatagccctgtgctttaaccttggtaatcatttcatcatcaactttagctaaagccaaggccatgatttccttaatcaggtttaagaagaaacagattatttttctttcacgcttaatataattatcttcagactttataatatttgcgatttcagttacaattgaattcataaaagaccagcttctaatgtgttttttgttcttaacatcagactactggtctttttgtttgagctcaagtccaaattcaaaggacttgggcttttttaattatttattcaacttaccgtaaaaaattatacacttagtgacgaaatttttgctattcaaagtgctcaaaaagagacgcgtaatcgttatctaaaaaaacaaaaagctatgttggcagaacatgatcttttacccgaaaaaaagcgcaaaccacgtgcccgcatgttatcagagctgaatttaaacaacgatgatgctattttaacttttgccaataaagttaaggttttcaccagtggacccgagttgtttgaccaaataattgctgatcttaagcaagctaaaacatcgattagtttagagttctacactttttataatgataatctaggaaagcgtgtcttacgggccttagaagaggcttctgctaaaggagtaaaagtcagagttatttatgatgtctctggctcacgtggtactaaacctgctttttttaatcatttaagagagcttggtggcgaagcacagcctttcatttctacttctaaaaagcattggtttactacaccacgactaaattatcatttacaccgcaaattaatcgtaatcgaccatcatattggctatattggtggctttaacatcggtgatcagtacgttaatcaatctaaaaaatttggtcattggcgcgatacacatttacgtgttgtgggtcaatcacctatcctaatggagacacgctttgccatggattggaatacttctatcagacgaactgcattacctaaatttgatctaagcgaattacatgcttttactgtcgaacgtaaagatcttgacaacgatgataacgtagcaatgcaaatcgtttcttcaggtcccgataaccaacattatggcattcgccgaggatatgagggcatcattgctggggctaaaaactatatctatattcaaacaccctatttaattcctgaagaatccattttagaagcattaattattgctgctaatagcggtgttgatgtacgcatcatgatcccttgcatgccagatcatccctttgtttaccgagctaccgaatattatgcaaaatatttagttgctcatggcgttaaaatttacaaatataatgatggcttcatccatgccaaaacaatggtttctggctccaatatctcatctgttggttcagccaatcaagacttcagaagttataccttaaacttcgaggttaacgcttttaattacaatattcaattaactcaagaacttaaacaaatttttgaaaaggacctagctagttgcagtcttctaactaatgaatactttaatcagcaatctaaatggcttaagtttaaacaatacttttcacgtctgttggcacctattttttagaaataataaaaccacgaagcaaaaacttcgtggtatttttttacagattattataaagatcctgcatttcatcatcttctggagctaacttaagatatctttctagcagttgttttgttatttcatcattattttgtacattgaaaaagattatcatttggcgcaaaaagtctggattatccttgaaatccggataagctagtaaaaattcgctctgtgctttctgaatatcatccaaatcctcatatgataatgccatattccaatgtgcctgtggctccacgctttcctcatctaagttactaaataaggcaatattctccttagcctggtgttcatgaacatataggttagatagctgcatacgtaaatcactattgtctggcgctacttttaaccccttttcaagtaagtcacgagctgtatccaattcattcaaattagctgctgcacgtgctcccattgaataaagtgtttcatccagttcattgtacgctaatcctgcttgagcagtcctcaatacttgttcattgtcatgctgatgatcataagcttgtgctaataatggatacgcatttacatagtcaggactttgctcaatcacttcatctaagaacttaattgcctgcttatcatcacctacagataagagaactaatcctgcttcatacttagaatcaatatctaaaatactatttgcatgttcacgaataactttggcagcttcttcataattacctaatttggcaaaagtcgcaaataatctttggtacagatttacttcactaaaagtactttgacgtttgattaaatcttgatataactcaagtgcttgttcataattaccacttaaatattcaatctctgctaaaccaaatttaatagcatcttcttctggagctaattgtagtgctcgtattaatttgtccttagctgtttctattaagccgttagtttggtaataatcagcttgtactaatagactatccaaataagctgaagagctctcagggacattatataaaagcgacagaccatcgtcatcatcgccatcatttaacataatctctgccaagtaaactttaaataaatcttctttaggaaatttagctattaaagctcgatatatttcttttgctaaatctgtaaaacctaagccagttaggttttctgctaaagatgacaagacctcgggagcatcattatctaaagcttcttttaaaaggtgtttgttttgtgaaaaatcatgattttgaattgcatctagtaattgttcagaataactcataatacctccaatcaagttaccattgtactaaaaaaagacgccggaacaaagtccaacgtcctatcacattagttaagctattacttaacggcatccttaagagctttacctggcttaaatgcaggtacttcactagctgggatttcgatttcatcaccagtttgtgggttacggcccttacgagcagcacggtgacgtacttcaaaagtaccaaaaccgattaattgtaccttttcacccttagcaaggttttcttgaattgaatcaaggatagcatcaacagtatttgcaacttgcttcttagttaacttagtttttgaagcaacttctgaaactaattcagccttatttgccatgaataattcacctcctgaatttgaacctaatgttcaaaaaatttttctttgtttaagctaaacaaggaaaaatgatcacaactaatcatgttccctaaaaacaaaaatatcacaaaaaccttataacaacaaggttttttatgatattttgcttatcttttatttacgtttacgtggtaaaatcttgattggtgtacccgtaaaatcaaagttttgtcgtaattgattaatcaaaaatcgttcatatgagaagtgcatcaattctggatcattcacaaatacaacaaaagtcggtggattcgtacttacttgggtcatgtaataaacacgcaatctcttacccttcaccattggagttggaactaacttacttgcttcaagcaacaaatcatttaagacactagattgaattctttgattttgattatcatagacttctttaaccatattaggaatttgatctaatctttgacctgtcttggcagaaacaaaaagaataggagcatagtccaaatattgaaattcatctctaatttcacgttcaaattctttagcgcttgtactattctttttcggcaaatcccatttgttaacgacaatgatgattccacgacccgcctcgtgagcatatccagccacatgcttgtcttgttctctaatgcctgtacttgcatcgaggacaagtaaaaccacgtctgaacgctcaatagcactcatagcgcgcattacagagtacttttctgtcttctcatacactttgcctcgtcttctgattccggcagtatcaacgaccttaaattttacaccatcatgagtaaacggcgtatcgacagcatcacgagttgttccttcttcattagcaacaattacccgatcttcaccaagtaatttgttaacaattgaagacttacctacatttggtcgaccaatcacgctaaaagaaataacatcatcagcttcagtatctttatcgtcaggaaaatcattaacaatctgatcaagcaaatcaccaataccagtaccatgactacttgaaacaggaatcggatcccccaatcctaaactatagaaatcataaatatcgcttcgctgttcaggattatcagctttatttacagctaaaataactggctttttagtacggtaaagaagatgagctattctttcgtctaaatctgtcacgtgatttaccacattggttaacatcacgataacatctgcttcttcaattgcaatttctgcctgagctctgatttcttcctcgatcttgccaccttcccaggtaataccaccagtatcgatcaaatcaaacttatgccccatccattcggcttgagcataattacgatctcgggtaacaccgggtttgtcctcaacaatagctaaacgttgattaattattctattgaaaagtgttgatttaccaacattgggttgaccaacaattgcaacaactggtaaaaccatttctcgccctcctttactaatctaaacataaataaaaaagccgactcaagtcggcttttttataaaatgactacttacggtcctttaattggtcaccaatgatgtcacctaatgcaaagccgttgtcgttatcactcatgtacttcttgtttactgaattttcgttacgtgaacgacgtggacgagaattatgattttctgaagaagcatttgagtcagcagccttgattgaaagtgagattcttctatcacttgggtcaatgttcaaaaccttaaccttaacactttgaccaacctttaaaacatcgcttggcttgtcaacatgcttgtttgagatttctgaaacgtgtaccaaaccttgaataccatcagcaacttcaacgaaagcaccaaagttagttaatgactttacttcaccttcaaaaatatcgccttcgtttaagtcagctgtagcttgttcaaatggagaaggttcagtttgcttaatagacagggaaatacgatgtctgtcattgtcgataccaatgaccttaaccttaacatcttgaccaacctttaaaacatcgcttggcttatcaacgtgcttgtaagaaatttctgaaatatgaactaaaccgtcaacaccaccaacatcgatgaatgcaccgaagttagtcaaacgtgaaaccttaccttcaacaacgtcaccaacaactaattgtgatgcaaccttgtcaaatgcttcttcacgttcttcttcaactaaatccttgtgtgaaaggattaagcggttcttgttaggatcaatttcggtaatcttaagtttcatagtcttaccaatgtaaggcttaagatctgaaacgtaacggtttgaaattaatgaagctggtaagaaaccacgtgtaccaacatcaacaattaaaccaccacgaactgatgaagttacagtaccttcgacagcatttccgtcttcgaagtctttttgtaacttgtcgtaggcttctctttcctttaagcgggtaactgagaagaagaattcaccattttccttgtcgccaccggctcttcttaatactaaggccttaaacttgtcaccaggcttaactaaatcacgtaagtctgcgttacggtctgaagtgtattcacgacgagtaatgacaccttcaacaccagcgttttcaacaccaacatcgatttggccgtcttcaatgtctaatacttcgacatcgacaatatctccgacctcaactccttgcatttgctttaatgcgtctaaaaattgattactgttttctgacatatgtacctcccaatatcatgtcccattttataggaaaccgagatatttttctactattttgtgctattttttctaatttttttgttttttttcgatttgagctaaaattgcctctacaacttcgtcaatcgacatgtttgtggtgtcaatttcaattgcatcatctgccttttttagcggtgaaattttgcggtgagaatctttataatctcttgctgcaatatctttttcaatttcatcaactgtttgatcagatttaataccacgctctttaaaatctaataaacgacgttcagcacgtgatcttgctgaagcaactaaaaagatcttaacttcagagttaggtaaaacagtcgtaccaatatcgcgaccatccataatgacatttgtcttgcctgccatttcacgttgcagacttaccattttttctcgtactttcggcaaagcggatacttccgaaacattagctgaaatttcaggcgttctaatttctttagaaacgtcctttccagctacatatactttttgctcaccattttcagatttcaattcaattccatcttcatcaatggcattcaagatacccgcttcatcaccataatctaagttatgattacgagcaatcactgtacatgcacgatacattgcccctgtgtctatatagacaaaggataatttacttgcaatgattttagcaactgtacttttacctgctgatgcaggaccatctactgctacttgcattctaataaaaaagagatcttatcatcgaccccttttatcctttctgaaagattatttcaacttaagtgtctgacctgcttcaatatttgaagagtctttaagattatttaatctggctaattcatcaacagtcaagccattcttttctgcaatttcatttaaagtatctccactttggactaaataagtcttaggagtagcagaactactagatgagcttgaactagccttttcagactttttcttgctacaagaagatgatgaggttttcttagtcttaacagacttggatgatttagaagaaaccttcttaactgtttgaacttcttcagctttttctgaatggcttgaagccaaacgatgaacaactgggataagtgcaattaaaataaccgctaaaattataataactgctatccaacgtgctgatccactaggctgactatcttgtgagcttcgcttttcagtaggtcgttcatagtgctgatatggcccggttgactttttatccatcaaaaattcctccattcacttaacggattaattttagcatattttaggatgctttgaatatgaaaaatcccatcaacttaaaaaattgatgggatgataacttaattcaaattaaatctcttacgaacgaatggcttaattgttttcaaggtagcttcaaacaataagtaaacagccacagcgttaattaatccttttaacaagttaaagggcatgataatactaaaaatgtaggttgacattgatggtaaatgcaataactgacccaagtaaactttctcagtaaagcttaacaaggcactatagctattaatagcaggcaagtttggtaccgctgttactgcgtaaataggagtcaaaacgaaggcattagccaatgacatcactgctgccattgcgataatcccaattaccaaaccacaaattggtttaactctgcccatcattgtcttgcggttatccgcactcacatttttacttaataaataaaatggaactgcaaatgacattgaagctaagaatgctgctagatttccaacaaggcttggtaatgcaaaaccactaaaaattaaactaagtaacattcgaattaaagcaataataactcccggtacaatgccaaaaataaacattccaattgtaataatgacatctgaaaaatcaaactttaagaaggcaactccaggcatgattggaaattcaaatttcataactacaaaagcaatacagccaattaaagcatatgcaatcacattagttaaactactattcttggatttagcttgatccataacttactttcctttcccaaaacaaaaggtctattgcttcagcaacagaccttaaaaagtgtagtaagtttttttagcctgtcttcttccatctagactttaactatcggtatctaacgattcaaccactgacgtgggtcgcggactttcaccgccggtcgggactttcaccctgccctgaagacaataaccttgaatatttaattacagttataatttagttcaattgcattaatttgtcaacttcatgcttcgataattcccgatattgccctgatgtaagcgaatccagagttaaaaaggcatatttttcacgagcaagcttatcaactaagtgacctactgctttaaacattcgcttaacttgatgataatgtccctcatgaattgtaatttggacaatttgtgtgtctttcttatgatcagttttcaatactttgaccttggcaggcgcagccttaaaatgatccaactttactccttgagtcaaggttttaatttcatcaggagttaaaatccctttaatcttggctacatagaccttagccacttcatttttagggtgcatcaataaatttgctaatttgccatcgttagtcattagcaataaacctgacgtatcataatctaatcttcctactggatacaaacgatatggtaaatcttcgaaataatcaactacagtttttctaccacgatcgtcttctgcagtcgaaacaacgccacgaggcttataaaacaaatacgtgtgtaggctttcccgctcaattggctcatcatcgactgtaatattactaaaagtatcgactttagtacctagcttagtaacaacatgcccatctactttaactcgaccggctacaatcattttttcagcttttcttcttgaagcgattcctgcttccgcaattactttttgtaatcgttctgccattttctatccctctttttctaaatgtttgtctgcgctaccttttgaatcgaataagtcaatctcctcaccatcagttgtatcctcaaagtcttcgattaacggtaaatcagccaaactttgataattaaaatattgtaaaaaataatcagttgtaacatacaacttaggatgacctggagcatcttttttgccgtcttgtttaattaatcctcgccaaatcaatgtctgtaaagctcctgatgaatttactccacgaatatcatcaatttctattctagtaattggttgtcgataagcaataattgagagaatttcaagtgctgattgactcaaattcttagttaaatctttttgaaaatacttttcaattatcttagctgtctgctgactagttgtcatcttataagtatttgcaatatgaattatttgcattcccgagtctggatcagccttcattttttgctgcaaacgagtgactaactgacctagctcttcaccatcaacttcaagtagttcaattagattttgctcctcaagcccattgtcacctgcgacatacaaaagagcttctaaatttgctagtttacttgccattcgtatcaattctttctaaatttaaatcaccgaattcacgtgcttgtgtaatctgaattaattgttttttacacaattctagtgtcgctaaaaataagccaataacatctgagatattctgcattttgtccgcgcaagcaaagaaactaacttgcctttttcgtttcaattgtccatgcaaaaaatccatcatctcattgatcggcgtttctgctactctaattgaagcggtatctggttgctgcaacttcaaacgatgtaagaccatcgtaaaagtcgtcgctaattcttgtgcagttatctgacccttaggcagcggttgaactttagcagtggttgatacactagcttctttagcaactgtaatcggtacttcttcattacgttctttaaaataagcagatattttcttaaacacagaatattgtaccaattgttgcactaattcgtctcttggatcttcatcaggttgaatatcatctacaaaatcgttttgaggcaacaaatactgtgatttaattcgcaataaagttgatgacatgacaaaatactcgcctgcaatttgtaaatttaagctttgcatttggcgcaagtattctaaatattgactagttatttgggcaattgggatatcataaatatcaattttttgcgattggatcaaatgcagtaataaatcaagtggtccttcaaaattcggtaattctaaagttaagttacttttgtccattatcttcttctaccgtttttaataaatttgtatattctggtacagcagttattcgtttatctggatattcgtgctttagttcatcaacaattttccgttcataactaatctcacgaaaaccaggagctaaagacaaatatctaataattacaaactgattagatacttgggttcctattacgcccaccatattattttgactattacgataaagatacaaaataaagtcattttcatcctgattaagcgtgatttcttcttttaagttttcgatatttttaaaatcaggtaaataggatagtaatcccattgctatcttctcataatcttttttatattgtattagcatttaatcacctaaagacgaggatgtgtcttctgataaacatttaaaatttgcttttgtgataaattggtatagatctgtgtcgtgctaatatcagaatgtcctaatatttcttgcactactcgcaaatctgcgccgttttctagcaaatgtgttgcaaacgtatgacgtaaagtgtgtggcgtgacatctttagtaattgccgccatttgacaatactttttgatcatctgccaaatagcctgtcgtgtaatcttttttcctcgattatttaaaaaaatatgttcatcgcttttccctacttgtaaaattagcggatcacgaacttcattttcatatttttttatccaatcaagagcaacaggactaattggaatcaatcgttctttttcgcctttaccaagaacccgaactaagcctaaatcgtcatgtaaatcctgcaactccaaattaattaattcgcttactctcattcccgtggcatataatgtctctaagatagcacgatcacgtatacctaactttcgtttagtatttggctgctcaagtagcctattcatttcagcttgagagagagctgtcggcaaacgacgttcttttttaggcaaatcgatttccaacattggatttaacttttgaatattttgccgagctaaccattgataaaatttacgcatgctagaaataagtcgactaattgagctggttgctttgttcaaatcacgctgccgagctaaaaacgcatccacatcgcttgcttcagttggccatgaagccataccttcattttctacaaaagtttgaaattcttctaaatcttgacgataagcattaattgtattatcacttaatcctcgttcaacttgactatagcgtaaataatcatcaatttgatcttttaaattaatcttctccattatcgttctcttctggatccttaattaaagtaatcgtacctgctgttttatcttcttcaattaatccagccttgagcaaatgaccgaccgcacgtttaaaagctgattttgaaataccaaagtatgatttaatttcttgtgcacttgatttgtcatagaaaggtagagtcttggtttctcttctccgcaaactcatcaaaatcatttgcgcatcatcatcaatttcttcaaaagcacgaggcaaagcactcaaattcaaacgtccatattgactgacaccgactactctacccttgaattgctcacctagtctcataggacgtggcatctgcgattcatgtacaaagccaagataataatcactagttaaaacaaatgctcctatctctcgtgtaacataaaccgttgcaaagacattttcattattcattccacgtggaaagttagcagctaattggtcaaaaatattttcatctgctagcttagcccaaatacgatctttttcgtcagtttctaatcttactaaaagtcgatcatcacgtcgaggccatctttctttttctctaggaagatcatccattgataaaacaacgtctttatcaggtagacctacatcaacaaagacgcctaagcctggacgtacctcggttacttttccccaaccatattgatcgggttgcgcgaatggcaaaaattgtgtcatttctcgatcatgacttttattatcataaataaaaccttcgacttcatctccaattttaggaatatcatcttgcgtaatctcgatcttcttcaattcataagtcagtccatcaatttgaacataataagctttatcgttttcgtcagtaatttttcctttacgaactgttccaagcatttaaaaatctcctactttacatattcttacatataagtataagagatttttatgcaaaataaaatagccagcacttaagctggctattttttgattagctaatctatctaaattatattcttaaaattaaaggtttgagattttgccttggtagatagcaccacgacgagcgtcaacagtaatagttgaaccatcagaaatcttgtcagtagcgtcagtagcaccaacaacaactgggatacctaatgataaaccgataactgcggcatgtgaagttaaacctgaagcttctacaactaagcctgaagctttcttgatagctgggttgtagtctgggtcagtagtcttagcaactaagatgtcgccttccttaaccttgctatttgcttcttcagctgagttagctacaacagccttgccgataactgaaccgttaccaacacctaagccttgaactaacttgttaccgatgatttgtaacttcattaagttagttgtacctgagtcaccaagtggagtacctgcaacgataattacaaggtcgccatcctttacgtaacccttttccttagctaccttagcagccatttcaaacatgtcatcagttgacttaggcttttcagtcaatactggttgtacaccccaaacgatacccaatgagtgttgaaccttttcgtcaaaggtcatagcaataatgtcagcatttggacggtacttagaaatcatacgtgcagtgtaacctgagttagttgcagtaatgatagtcttaacacctaattcttgagcagtacgtacaactgattcaccgatagcttcagttacgtttgaacccttgtaagcttcgaatctttgaagagctaaagtattacgcttaagcatttgcttttcagtacgttcgtcaatttcagccatagccttaacagccttaactgggtaaagaccatttgctgattcacctgaaagcatagttgcgtcagtaccatcaagaacagcgttagcaacgtctgaaacttcggcacgagttggacgtgggttttcttgcattgagtcaagcatttgagtagcagtaataactggcttaccaagtgcgttagccttgcggattaggctcttttgtacaaatggaacttccataaatggaatttcaacacccatgtcaccacgagcaaccattaaaccatctgaaacttgcaaaatttcgtctgcgttgtcgataccttcttgagattcaatctttgggaagatcttaacgtagtctgcacctgcttcttcacaaagcttacggatgtctaagatatcttgagccttacgtgcaaatgaagcagtaatgaagttaataccatagttcaaaccaaacttaatgtcatcagtatccttttcagtaatacctggaaggcgaatttcaacaccaggagcgttaacacccttctttgaaccgattacaccagtgttttgagcttcacaaacaagttctctctttgagtcgtccttttccttgatcaaaaggtcaaccaaaccatcatcgattaatacgtgaccaccaacgtgggtatcatcgtataaaccgtcgtaggtaacgtggatcatgtccttgttacccttcttagtggcatccattgatacacggatcatgtcaccagtattaatagtgaacttgccaccttcttgttcagtggttctgatttcagcacccttagtgtcaaggtcgataccaagaagtaaaccagtatccttttccacttgacgaaccatcttcatacgagcaaggtgttctgggtggtcaccgtgtgagaagttgaaacggaatacgtttgcaccagccttagctaaagcagtaatagtttcaatatcgtttgaagctggccctaaagtactaacaatcttagttttcttcattattaaaaaaatcctctccaaaaatcaactaaattaatatttagtcatttcttcatttacatccaataacgcataatcaccttggtgtttaccgtcaaacaaatcaagaatgtcgtgggtattaagttcaccattctccatgccgacagctaaaccgcccttcccatcgagaagtaacttaacagcataattacccatcttagtagcattaactctatctgtaacagtaggtgagccaccacgttgcatatgcgcaaggacattagcacgagcatcaaagtcaccatatttaaggagttcgtccttaaacttatcagcagccataacgccttctgctaaaacaatgataccatgatctttgccatctgcaaaaccacgagtaagagtttctgcaatttccttaacatcgtatgaacgttcaggaattacaattgcgtctgctccacttgctacaccgacacgcatagcgatatcaccacattcacgacccattacattaacaacgaatacgcggtggtgactgcttgcagtatcacgaattttatcgatagcatccatagcagtacgacaagcagaatcaaagccgatcgtgtagtcagtataaggaatatcattatcgatagttcctggtaaaccaactgagtttacgccgtggcgagtcaaggctaaagcaccatggtatgaaccgtcaccgccaattacgataaccgcatcaataccgtgtttctttaattgctcaacacccttttgttgcacttcttcttgtgcaaattcagggaaacgagcactgtacaagaaagtaccgccttcactaatcttgtggtcaacattttccgtggtaagcggaacaaagtcacctgcaaccaaaccagcgaaaccataacgaattccaaagacttcaagcccatgatggatagcagtcttcgtcacagctctaattgctgcattcataccaggggcgtctccgccactagttaaaataccaatccgtttcatgaattcacctcatcatgattattttgtgtaatttctcacatcacataaatattaacattttttaggcaaaaaagctcacaaaaattgggctaatttatgctttctttccgtatttaagtttgttagcacttacatccatcgtcaaagatagctttgtaatttgaactttattctttaaaattaacttttcgcaaattggttaagaaatactgttttttattttggtcaaatcgatcaccttgaaccttgactcctagtaaataaatatctccttcttttaaaatagagccaaatttttcataagccggtggaaaaataataatttcttgttcgctagatgtatcagcaaaactagcaaaagccattgtttttccatttttggtcctaatttgctttaacttcattaatttacccacgctaataccactatcatttaactgaaattgattcaatggtctagcgttaaatttttgtgcatatttttgtacagctattagaggagtagttgttgtagtaaagcctaaagctttctcttccatttctgctttttgggcagcagtcggtggctcagcaggcttaagtggtgcatcccccagaatctcagataaagacatattttgtcccgttaattgcacattagcaattacatctttgcagttaagcaataactcattgcgattatcttcgattgagtcaaatgctccagccataatcaatgcttcaattgcgtctacttgtaagaacttagcatcgattctacgcaaaaaatcattaaaagacttatacggtttagtattggcagctatttccttagcaaaatcaagacgtaatcctttaattgcttttaaaccaactaaaatcttgccatcttgtaaagtatagtctaattggctgtgattgatatcaggcggcaaaatacgaactccagcttcctgagcttgcatcgaatagctttgcgctttagcagacgttgatgaattgagcatcgctgtgtaaaatgcagcaggataatgaaccttcaaataagctagccaaaaggcaatcttggtatatgccaccgcgtgtgaacggttaaaaccatagttagcaaattgctctatataatgataaactcgctcacctacttctttaggatgaccttttttgaccgtaccagcaataaattttccacgttcttgctcaatgacattctgattctttttagacatcgcacgtcgtaaaatatcggcttcacccaatgaaaatcctgccaggatttgagctgtttgcatgacttgttcctgataaaccaaaattccataagttgattgtaaaatttgctttaaactgggatcaggataatgcacagtagccgtaccattttttcttgcaacaaatgcgtcaatattttgcattggacctggacggtataaagcgttcaccgctactaggtcctcaaaattgtcgggatgcaatttacgcaaaacaccacgaatcccaccagattcaaattggaagactgcatctgttttaccttgttgaaacagttccattgttttgggatcatttaacggaattgtattaggatctagctttacaccttgctgccgcactaaagctaaaatattgcctaaaactgtcaaattgcgcaatcccaaaaagtcgatctttagcaaacctaatgattcaacatattttttggtttgctgagttacaggaatgccgaaaggaccagcctgcaatcccgaaatgccagcaatcgaatcatcactaatcaccaatccagccgcatgaatagaataatgccttggcaatccctcaagtcctaaagcagtcttaaataacaatttattctcaggcgttgcatcaaccaataatcttagttctctagactcttgatatgctttttttaatcccattttatctttagagtacgggattgcgtgagtccacttagtgatttctggtcctgttaagccaaaaacccggccaacgtctcttaatacttgtttagcagccattgtaccaaaagtcaaaatttgagcagcatgatccatgccatacttttgatacatatacttaattactgtattccgttgaatatcaggaatgtccagatcaatatcaggcatctcatgacgagccggatttaaaaaacgctcaaacagtaaattatattggatgggatcaacttcagtgatacgcaaagagtatgaaaccagtgaaccacaagctgaaccacgtcctggaccagtagtaatttttactcggtgacaatagttaattacatcccatacaatcaaaaaataatcatcgaaccccatctgattgatgactcgtaattcataatttaatcttttctgatactcggctggaatacttttttgaccaaagcgcgcttgtaaaccagtttgagccaaataacgcaaatattcttctgaagtcggaaacttatcttgatgatatttaggtaagaccggtttttgaaagatcacttcagcattacatttctgagcaattttccaagtattattaattgcatcatccaagtcatattgatgatagcgttctaaaacattttgtgcagaatctaaataatgcgaaccagcttgcttagctagtggcaatatatcttgcaatttatctcccttagcaatcgcacgcaaagttttttgtaaaaattgctcacgtggccgtaaatattgactatcttccactgcaactaaagataattcaaattgcttagctaatccacggacataatcaatgtaatctatacttgcttttgaagcatatacacccaaataaagatcaaacgttaacttctttagttggcgaacataatcactgcctaatgcctgatttgtatcatgcagcgccattaattcactttttagattagctggtacgataatcaacaaatcatctaaatatttggttaattcattcagcgttaagaccttatcgttttgcccattttccgttaacaaatttaccgcgctagaaagtcgcaataaattatgatagcccttatttgttttggcaaaaactagcaaatcatatttttgggtgctatcaaccaaaccatttaaacgcagttgcatcccaagaagtggtttaattcccgcctttttagccaactcataaaaattgaccaaaccataagtcacgttcacgtcggctaaaccaaccacaggatagcccttctctttagcgtcttttatcaaatcacttaccttggttggactacttaaaagcgtaaaggagcttatgttttgaagtgctgctacttgcataaattaaccacctttcgtcattacaaacattaaattaagtataccaaattgaaccaatcaggtttgaatttgcgcttcatttttgataaaatcttacacgaaagaaggaatcattatgggtcgttatatcatcacaactgtatggagcgtaatctacatgttagttgtaggctttattgctggtcctttaacccgaagtgcttcattcaacggcacagatttaagaaattgtgtaatcgttgggatcatttttggtattcttttctcagcaattattgcgactattactgctcgttcacacaaagataatagtaaatacagtaagttaaaataattattcaatctattcaaaaaagacgtgagatgtttttattctcacgtctttttcgtttggtttagtaaaacttataattcttttttgtatctacttcgactggtccatgagtcaaatattcgctaaacatttgtacatagtccttatccaaagtggtttcaattttgtccatactatattcaggataaaatcccccacccatagcacgatagttgttaactgctaaatgataaatctgatcatctttgattggcttaccgtgcaaagttagtttagtcagccgttcacctactggtctggataaatccgcttcatattcgactggataaaagacgtcaaaatgatacaacattggcttaggcttaatccatcgatcaataaagccaatgtttcctgcttcatctttcttcaaaaagccagcagagtgctcaataatatgacgtaattctttaccagtcagcttcacacgacacaactgattagcatacggataatttaacaaaacatctctcatagtaatggtcttatcaaatcccttagctgtctcactcatcactgcagttgccgaaacatcagctttagtaaaccataattgcatttgctggattaaattaataaatggcgcgccttctattctgcctttcattgcattttcaattcgagcaggtttatctaaatgtgcaattggttgatctagccatttttgtgttcttttatccaagtcagatacaatatcaacaattacaggatcaggatcataatctttagtgtcaatcaacttagtggacattgatttgattttcttagtatcatcatcaatatcaagaaccacttcagctacagcttcaccgcgataacctggttgaacaatagcagtatcgcgtgtaaccaaatttaagcgccgatgctggtgacctgtcaataggacatcaacttctggaattttggttaaaatctgataaccttcattttcaccacgattaggttcagtcgccttaccagtttcaggatcactttcaaagccaccatgatacatcacagctaaaatatcaacctgagggcgtaatattttggcataatgcttaattttttcgtaagcagaggcaaactttaagccttttacattttctttaggttcccaatgtgggatatattgcgttgtaatccccaataaaccaatctttaagccatttctcttgataatagtgtattctctacccaaaaatggaacttctgtttctgcatccagtacattatcattaatgattggtgcctcattgttatcaacatagtagcttaaataatctaatccaaagttaaaatcatggttacctaaacagcgagcatcataccccactgcattataagcttgcgtaaaaatacgtaaatcactataatcgccagttgaatgagcataggaagcaagtggtgagccttgcaaacaatcacctgcatcggtaactacaacattgttatcaccatactttttcttttcagatttaataactgagctaactctactcaaactaaaaggagcatgatagtcggttttattttggtaatcagttggcaacaaaaatccatgtgtatcactagaatgtaaaaatactaacttcattatttctttttcctttttctaggcataaaaaaagacaccatatcaaaggtgtcctttaactagttattgctgttgtcgttgttatttacaacttgacgacccttgtaataaccctttggtgaaacacggtggcttaagcggtattcaccagtagttgcatcatagtgcattgctggaacactcaacttaatgtgaccacgacgtgaacgtttcttttgtttagaagtatgtcttgcaggaactgccatttaatttgatctcctttattgtagtcttaagcttcagggtcatataaccccgaatcactcacgtagttcaatcatactattcaattgctaataaatcaagatttattctattttcttctcttttttattgaagaaagtgaccttgtgatccgttttttccttagtatctcgtccaaagaaccaagcaataatcatcccgataatcaccattaccactaacacaacaattagtggtaacctcaccttaaaaaagccaaaattaattgcgacaggtgatgtatttaaaacaacaaaaattactgcaattaaagccacaactgatccaataattaaatttctttgtttttccatctttttttactttctagaagcaaactttaaggaaatcttatcaccaatcgatggaaatagattatacaatttagccgctacagctaaactaagtggtaaatttaattcacgtttatcactgccaaagaagtgaactacttgccaagcaacatcatctggatccaacataaattcttgaacatttttgacataatttccagtcttatctgctacattaaggaaattagtataaactggtcctgggtttacagtcattaccttgacaccaaatggctttaattctagccgtaagacatttgaaaattgaattacggcagccttagatgaactgtaagcggctgacttggtagttggtaccttgccagcaattgagccaaaattaataatttgaccagtcttttgttccatcatgaccctacctactaaacgagtaaagtacatcaaacctaaaacattaacttggaacatattggtaacgtcttgcattttttggtccataaattcttcgaatttaccaaaaccagcacaattaactaaaaagtcaatgtgttttacttgttcagtaattgcattaaaggtttgttcaatttcttccggcttacccatatctgttggaaaaacatatgcttcagcaccggatagttctttagcttctgctgcaatttcatctaattggtcctttcttctagcaattaaaattacagtagcaccacgaccagcactttcaagggcaatggaacgtccaatcccacttgaagcacctgtaattacaacaactttatttcttaatgagtctttcatttttctgagcctttcattggaatattaatctgatcaaaatcattaactaataccgtattagaaaatacttttttagcctgtttttcgagttttttccctttagcacccatataacgagcagaaatatgatttagacataataatttaacattatctttccgagcaattttggctgcttcaaccgaagtagaatgataataatcatgcgccaatttttgttcatcccctgcaaaagttgattcatggactaaaacatctgcatctttagccaaacgagcaatacttggcgtggaacgtgtgtcatagatgaccgtcacaattcttcccggtttagtaggtcctaagaaatttttaccatccaaaacagtaccatcagctaaagttactttttcgccattttttaatttccccaaaagtggcccattaggaacattatactgtgctaacttgtcaattaataattcgcctggatgtgaagcctccactactctaaaaccaaaactaggtatccggtggtctagttgctccgtatacactcgaaagcccttatcctcacagattaaccctgatttagctaattcaacaaaccttatagaatatgaaattttagtccgagataccttaagagctgttctaacaaattcttcaataccactgggaccataaatagtaataggaccaacatcaccttgaaaagaacgagttgacaataaccctggtaacccaaaaatgtgatcaccgtgattatgtgatataaaaattttggtaacttttcgtaatttaatatttgttcttaaaatttgatgctgagttgcttcacctacgtcaaaaagccagatttcattcaattcatccagcaacttaagtgcaacactagaaacattgcgttgctttgaaggttgcccagcaccagtacctaaaaattgtaattccatgaaaatcctattctaatctaaaattttgaatgcttaacaattgttttggtaactaatgcactatagtattttgagccctttaaattagggtgagtatgatcaccgtagaaccagtcaggatgattcttcgagtatgaataccaatcaattattataagattatgataccgttttgcaccttgatttagcaaattattcactgaattttgccaatctctagttggaacgtgaacattaatccagaaaacttttctcttaggtccagcctgatgcattattcgatcaagatcttccattgagaaaggtccattagttcctaaccctattaagatattatctgctaaaactccttgactttgataactatctaataagccaaaagcaacattcaattgtcttgaaacagcagcatcaattaacgctttaggcattaatcgttttaaatcgttgctcgaaccggccattaccgagtcgccaatcgcagttacttgaacatgttgagccaattgcaaatctaactgggaaataccatatttaacaaaggatttgttaataggatgctttttagtttgaagctcagcttcacgaataattttagattttttttcttttttctttttttctttttttaacttttcaattaatttagcattatccgttttttgttttttagaattctgattaattcgctgtgctaattggcttttattaaagtcttctgcttttactcctggtgaaatagcaatagctgctgatcctaagattaaaatcaaagctgctaaggctgcttgacctttcttaaagtaatcttttgtttcaaaattaaaaattcgagcaaaatattgcttcgttttatcccaggtaatcctacccattggtctttcaatcaaacgataagtaatttctgtaatcactaaaattaaaatcacttcaataaggtgatacagcattggattatcaccaatatttaccttatcttcaaaaaagatcattactggaaattgatacagatagatgccataacttcgcgatccaatccaatcaaataacctattagttaggatttgattccaatgactaccaggatgagcaattaccgctactaaaatacatacatctaaagtaaataacaacatcccgccagagtaagtaaaggcttgttgtggattcatccacttagagaaaaacattgctaacattaaagcaaatgaagcaaggcccaccaagtccagtatccagcctacttttcgttcaacttgctgatttaaactctctatcggccaaacaactgctaatgctgctcctaatcctaaagaaaagaaacgagtatcagttccataataaattcgattaatatcagcctttaaaaagtataggattgccatttctaatgcagaaacagctgatagaccaactaaaatccagaaaatattttttttctttttaaccaatttaactagtaaataaatgacaattggccaaacaatataaaattggccttcaattgacatcgtccataaattagtaaatggtgattcattagctgcaaaacgctcaaaatagctttgaccattatgaatttgccaaaaattaaatacatttaatagatttgcaagtacaacctgatttaatttagccagtaaatttcgttgaaagataaagatataggctgcacttaaccataaaacagtaattaattgtggatataacttttttattcgactcaaataaaaatgacgattattatatgatcctgttttatcatatgaattaaacatatgatctgtcaccaaatatcctgagagcacgaaaaaaatcggcactcccagatatcctcccataaaggaattaggatccaaatgataaagaattactccgataactgctaaggctctaaggccagaataccccgtaataaacctattttttttcataccctatctctactcttattgtacgaattcaaagacaaacttgccaatagccacatcatcaccattaacagctcctttttcacgtagtgcgtcatcaacacctaaacgcttaagctttcttgctaaacgcataataccgtcttggtgatccaagttggtcatttgaactaatctttctaattgttcacccttaacgataaattcatgttcgccaacttgctcaactgtaaattcattcttttgtggtgcctgatacttatattctttaatcttttgtgctagcttaggttgttcttcagcctgttcttgttcaacttcagttactaagttggcagtatctgacatcaacttatctacgcctttatgagttacacttgagatctcataaataggttcattatttccttctgcttttaatgcttttttaaactcagctagtttttcctcagcaccaggaatatccatttgtgaagctacaatcaattctcgcttctttgataaatctgtttcgtaatttttgagttcttttttaatggtatggtaatcatcaattgcctcacgaccattattaggatccattgaaactagatgtagaattactttggttctttcaacgtgacgtaaaaattgaattcccaagcctacgccttgactagctccttcaattaatcctggcaaatccgccattgaaaagtcacgaccatctggcaagataaccattcccaaattaggagttaaagtcgtgaattgataagcagcaattttgggcttggccttagttgttactgataacagtgttgatttaccaactgacggaaaaccaactaagccgacatcagccaataattttaattctaagcgcaaaacgcgatcttcacctggttcaccattttcagcaatttctggtgcagtattaacactagttgcaaaatggatattaccgcgaccgccgcgaccacctttagcaacgactagttcttgacccttttcagttaaatcaccaatcaattcattagtgtcataatcatatacagtagtaccaactggaacttttaaataaagatccttagctgcacggccatattgtgatttaatacgaccattttcaccactatccgccttaaacttacgccgatagcgaaaatccatcaaagttcttaagccgctgtcagcaacaaaaataatactgccgccacggccaccatcaccaccggctggaccgccattagggacgtatttttcatggcggaaagccaccatgccatcgccgccttttccggcttgtacttcgattttagtttgatcaacaaatgtaggcatgtatatctcttccttccgtcttaatctagcttttaatactataccacagaaatacgcatgatatcgcgttttctcggattacaatgttaattttaccgtttgtgcttgagtaagcgttaatcctgctctacgcaagtcatcaattgaagcttctttaattttcttcaatgaaccaaattcgcgcaataatttgttacgacttttaggaccaattcccttaatcgaatctaaacgactggacaaagcatttttagcatggcgtcttctatgaaaagtaatcgcaaagcggtgcacttcgtcttgaacgcgcgtcattaaataaaagccctctgatttgggattaaggggaatcagtttcaaaggaataccgttgatgggatcgccaaataataaatggtttgttctgtgcttatcatctttaaccatccccgcaactgggatattcaaatttaattcatttcgtaaaacatctaaacaagcatcgacctgaatttgaccaccatccatcaaaatcaaatcaggcattcttttatgctcgcgcaacagtctaccatatcttcggcggacaacttccctcgtgttgcgtacttcgtcgccaccattttgatgttcaacctcaccttttagcttatatttacgataagctgttttttcgggttcaccatctttaaaaacgactaaagcagagactgggtcagcaccttgaatatgggagtgatcaaaactttcaataaagtgtccatatggtaagcctaaagcatcaaaaatttctttttgagcgcctttagtttttcgattacctagttctaataatctaaacttatcatctagctttaacttagcattatccttcgccatgtctagcaatgactttttctgccctcgttgcggtgttctaacaggtaccttcaaaacctcagctaaagtagcattatcaaatccttcaggaatcagaatttctttgggcaaaaccctatttctttgcccataaaattgcacaataaaggaagtgaaagcatcttctggatctgtggcatctgtcaaaggaaacattctggtttctctacgcaataactttgcttgccgtaaaaagaagatttgaacagaaatccaagacttgtcaacgtaataattaaaaatatcacgctgcgtattatcattggaaataattttttgtttttcaaccgtttcttcaatatatttcaattggtcgcgaatttcggctgctcgttcaaattcaagattgctagctgcttgagccattttttcggtcaaactctgcttaacactagcaatatctccattcaaaaagctcttgatctttttaatttgctcttcgtattctttttgtggcacttttttaaagcatgcacctaagcactgccccatatgatagtaaagacaaggtctgccttgataaccatgacagcgccttagtggaaaaactttttgaataaacttcaaagtggcctgggcagcatatacattaggatagggaccaaaatagtagccaccatccttatgaacgatactagttaaccgagtttgcggatcatgttcacgcgtgatttctatgtaaggatatcccgtaccctgctttaattgaacattataataaggttgatacttttttattaatgtaatttcaagtaaaaaagcttccttatcagttgatacagtaatgatgtcataatctcgaatttcacgaactaattcagcacgacgtccaacctgtttactcttaaaatatgagcgaacccgattttttaaatttttagatttaccaacatatataaccgtaccgttaatatctttcatcaaataacagccgggtttttctggtaaaagttttagtttattctcaattaattgtgttgccattatctcatctcactgaaaaaatttgcatttaatagtttaacacagactgtttaagaagatcttaactttgcttatagaaatagctattcggtacaaaagttgatatattaaaagaaataaaatttgaggagaacttttgatgactaatctagtttttgacttaattaaccaatttggctacctagccatcagtttgctaattgcaatcgaaaacatctttccccctattccatccgaagtaattctatcgttcgctggctttgcaacccatcattctcaaatgaatgtcttcggtgtaattattgcttcaacaatcggcgcggtagttggtgcactagttttatattggattggcactttacttaatccagatcgattagaaaagttgttcgatcataagttattcaaactacttggctttaaaaagggtgatgtacaaaaggctatcagatggtttgataaatacggtaccggtgcaatcttctatggtcgctgcatccctgtagttcgtagcttaatttcaattccagctggaatagccaaagttaaattacctaatttccttatttacactagcttaggcagcttactctggaatgctattctagttggtcttggttcctatatgggtgaaaattgggaacaaattgtgttaatttttgaagaatactcattaattattggaggacttattctaattgctttaatatatttttcctgtaaatggtataagcaaaaaattaaagctgattaattcaaacgctctataaaaaatatagagcgttttcttcttttaaaaattaaaaatatcatgtaaaattaatctaatctataataagggaagtttgcgaatgaaatttaatatttttaggaaacaaaatgttgagaactatctcggtaaagacattaagttctccaaaacaatgaacgccgttgatttaatgtctcttggcgtaggagctgtcatcgggaccggtattttcatcttacccggaactgttgcagccacattaactggacctggcgttagtttatcctttgttgttgcagaaattgtttgtgctttagctggaatgtgttatgcagaatttgcttcagcgatcccagtagctggttctgcctattcatatgggaatatcgtttatggcgaatttacaggctggattatcggttgggcactgattttggaatacatgctatctgtagccactgtggcagcaggttggtcatcatacttcagttctttcattgcaccatttggtctaaaaattccacacgctatttctggtcctatgaatcttaacaatggcgtttattttgacttggtttctgttttaatcattttacttatcagtatcctgttgtcacgagggatgaagaactcaattaaaattaatgtcgtagctgtttttattaaaatcgccattattttaatttttatttttgtaggcttacagttcattaaacctaacaactatcatccgttcttgccatatcatttttcaggagtcatcaaaggagcaaccacagtcttctttgcctttcttggctttgatgttgtttcatcatcagccgccgaggttaaaaatcctaagaaaaatatgcccctaggaattattggcactttagctattgcagctgtactttattttggcgtttcaatcgttttaacgggtatggttaattataccaagctaaacgtatctaatcccgttgcttttgcattgcaatatgttcatcaaaactgggtagcagagttattatcatttggtgctatgctaggaatggctaccatgatgctgacaatgatctattcaagctctcgcttaatctatgctatggcacgtgatgggctattgcctagtgcattcagtaaattagataaaaaacataactctcctcaaaatgccttagtcgctgtcactattattattgcagcaggtgcagcattcttctccgttgatcaactagccaatttggtcaactttggtacactttttgcctttactcttgtttcctttggaattctaaaattaagaaaaagaacagatattgttaacgatggctttaaagttcccggatacccatatttgccaatcatttctggtttaatttgtatctttatgatttgccatttaagttcagaagtttacttaatggcagctatttggttaatcatcggtgctgtaatttactttatttatggctaccaccatagtcagcttgatcatgattaacatcagtaaaaattatgtaaagaaaaagacgattcgcatgaatcgtcttttttagctctgtttgaactagttaatttgattaattgcctgaccatctttaaagaaagacaaaacattattcgcagcttctttagacaaattaaatctagcaatgtgagtagctgaaccaacgtgaggcgtcatgatcacattatccatttcaaccaattcaggtcttggatgcggttcgttttcgaaaacatctaaggcggcgcctgcaattgaaccattctttaacgcagcaattaatgcatccccgtcaatcaacgatccacgagcaacattaattaaaaacgctgtgtctttcattttctttaaaaagtctgaattaaccagatgatatgtttcagctgtagcaggagtatgtaaactcacaaaatcagcttcttttgccaaagtatctaagtcaacatatttagcatctaattctgctgcaatttgatcatctacttgatgacgattatgataaataattgtcatactaaatgctttagcgaacctagcaacttgttgaccaattcgacccatacctacaattcctaaggtctttccttcaatggagtacccttggttgtcgtactcatcggcatttaaaaagacgccttcacgcaaagcatcgtcataataatgcaatctacgagctgatgccataatcattgtccaggcaagttccgccgttggacgcaacacactcttagggcaatttgaaacaactattcctttttctttagcgtattcaacatcaacgtgatcaaagccaacgccataagttgaaattatttttaaatttttcgcagcatcaatcatttctcgatcaaaagccatctttgctacgatcacaccatcatattctgcaatatgatcaagcacccactcacgatcatcttctggtcgatgtcctactggaccgatatcaacttgacaaatattttttaaatcagttaaggcctcatctcttaagccacctaaaactaaaacttttgctttattcattatttttagacctctattcaattttcatcttaaagtaaaaataccactatttgaaagagaaaacatctactttaatattttattgattgcaactgcaacaccgtcgtggtcacaatcagccgtaacttcgtcagcatgttgctttgtatattcaacagcatttcccattgcgatacctaatccagcataagttaacatcggcatgtcgtttgcttgatcgcctagggccatcacattacttcgatctatttttaagtagtcacatagtcttttcaggccagtccccttatcgacaccggcagcggttgcttcataataaaaaggctcagtctttgaaaatacaactcgatctttcatcatttcaaataaaggagattctattttatcatctaaatagtctggatcatcaacatacatacatttgatgattggtatctgcttcatttcttcttgtgtacgatatgagacttctaattttacgacccgtgaattataaattgtataatgtcccaaatcacggctagctgtataaattcgatctaacgatacgctatgaaaatgtaagtttagctttcgcgcaattgtctctaaatctacataatcttcatattttagcccctgtttgaaaataacctgccccgcggttgattctacaactgcaccattaaaactaactacatactgattttcttggccattaagccctaattcatctaaataacgttgagtatctgacaaaggccgacctgtgcaaattacgatttgcttgccttgtttttgagcagtcaaaattgcttttttaactgctggtgtaatctccttcttagaattaactaaggttccatcaatatctatcgcgattagcttaatttcttccattaccttttcccttaaaacaaagaaagcaccgcttatgcgatgctcctattaaacagccatggtctgcgtattttcttttaacttgaccaaatcagccatatcatcagcactgatttcaaaatcgatgttcaagttttcctgcatttctttaacattatcactcttcggcaaaacaatacaacctagctgtaagtcaaatgctaacattaattgagctggactaacatgatacttttcagcgtaagtcctgattcttggatcctttaacaaacgaccatgtgcaagtggagaatatgctttaatctgaattcctaaatttttacattatttcatcaaatcagttggcacatttcctatatgaacttcgatttgattaactactggcttaattgagctgttattaacaatgttagctacgtcttcttgtaaaaaatttgaaacaccaattgatctaactttaccggctttaagtgcttcttccattgctctccagttttccagattgccttcaaagtgacgatcattaattctattcacttcaatccaaggttgtggtgaatgaattaacaacatatcaatatattccaaactaaatcgatctaaagcgtcatcaattgcttttttgtaccttcatagtctttaatcgaagttggtaatttagttgttaaaaaatatcactactctcaacatcagagttccaaataccttttcccacaccactttcattgccatagtctttagcagtgtcgaaagcgcggtaaccaacattaatcgcttgacgaattacttttcgtacatcatcgttattaattagccaagttcctagttgaattcgaggaacctctactccgttattgagcattaaagttttatcagagtacatatatacacctctacattttactaatatgtctctgtttcttaattcctgtatttgtatagctaataacaattattaaacaataattgtttttttcagccatctgttaatagagtacaacaaaattgttgcaaatcctatacatacattttattttttgtgattctgttatattttctaattaaaatagtagcatcaatcaatgctgctgggtttataaagattatcaaataatttattttattattctatacaaaattaatattttcgtataaaaaaagaaagggctgatgatgtcctatcaactctttctcttcagtctcttaattcccaacacctataataccagcatttatcatttaaacaaggataaaaaacatcttttacttacttttagttttcacattatagttttcatcacatgtttaaaaagcttagatgctatattacaaaatgattacaagagaaatatagatcatatagttcactattagctatatgcaaatactatattttttgagcaataagctgcaacaatttttgagcaatctttcgcttactcattttaggccatttcttagttgacttatttttttgtaaaatcgttacctggtcttcatcattgccaaaaacatttttagaaacgtcatttgctacaatcatatctgcaccttttgaagatagcttttttgcagcattttgtagcaaattattcgtttctgccgcaaagccgacaactatctgccctcgctgcttgtggctagcaacttcgcgtaaaatatctgtcgttttaactaaagttagagtcaaagtttgttgatcagcttgcttttttaatttatgatctgcaacttgtttcatgcgccaatccgctactgcagcagccataattaaaacgttactatgcttaaattcttttttgactgcaactaacatttcttcgctactagaaacatgaattaatgtaatcctaggattttgtggcaaaggcatacttacattaccatatattagctttacttttgctcccatcgctgctgcttctgtagctaaggaaatgcccattttcccactagagcggttaccaataaagcggacgggatcgattgcttcttcagtaccaccagcagtaataacaatattttttccttgcaaaacgttctgttgttcagtgaaatttttgatccacgccacaattgctcctggctctggcattcgtcctttagcagcatagccttctgccagcatccctactgcaggctccattatttctacaccatgttctttcagaaaagctatatttcgctgtgtagctggattattccacatttggtcattcatggctggtacaaccaatttaggtgcacttgtagctaaaattgtagtgctagctgcatcgtcagcaattcccgttgccattttagcaataaaatttgcagtcgctggtaaaaccagagctaactctgtccaacgcgctagatgaacatgtggtatgctagactgattttccttgctccataaatcatccaaaacaggatactttgttaaagcagccagtgtattagtagttacaaaatgctctgcatttttagtcattactatttgaacttgatgacccgctttttctaaatcgcggataacgttaactgccttataatcagcgattccacctgtcatataaattgttattcgactcattttaccattcctcgtcatctaaacttatttttattttatcattgtccacttaaatagtagaatattgtgttgggagttatatttggaggaaaaattgaaaaatatgcaaaaactacttttactaactatattcttacttagcttatcggcctgcactaaaccacaattatcctctgtaccacgtgataaaagtgccactacaatcaagattgttgataggaagcttgagttgcatcagcccactaaaaggccacttcaacctttaaatggaattttgcctcattggctgcaaatgccagataaatctctgcctaagccagcaatttatactaatttgaatactgttcttaaaaacaaatagggaaatgattagtttcatcttccctattttttgttcaatttacaagttgctttaaaaatagttgttttatattaatgagtaatttaaaatttatataatacagaaaggaactttatatatgccaaatttatccagtgatttaacttcaactattaatgagagactaaacaacttgaccgcatctaaaattcgagcatttgaccaaaaggtctctgaaatttctgggattattaagttaactattggtgaacctgatttagcaacacctgatcatattaaagatgccgcaattcgtgatattcaggctaatgattcccattatgctcctcaagctggtaagccagaactacttgaagctattagcaattaccttgaccgctcaattggtgtacattatgatccaaaaagtgaaatctgtgtcactgtcggtgcaacaggtgcattaaatgatgtctttatgaccttgcttaaccccggtgacaaaattttggttcctactccggtttgggctttatactttcagctaattaaaatgactggagcaatccctattcaagtcgatactaaaaaagatgacttcatcttaacagctgaacatttacgtcatgttctcaatggtcgcggtaaaggtgcaaaggcaattattttaactgatccttctaatccaactggccgcgtttattctgccacagctctaaaaaccttagcagatgtcattaaggaatacaaaatcttttctgtaactgatgaaatttatgcagaacttgtttatggcaaagccaaacatcactcactttctgaatacatccctgacagaaatattttgatttccggtttatccaaggcttatgctatgactggctggcgtttaggctatattgctgcccctaaacaaattatgaagagcatccgcaagattaattcatttttagttacttcagttactgataacgttcaaatagctgctgtcgaagccttaaacaatggtcaaaacgatcctaaaaaagcacgcgaaatctacgaagcacgtttaaactttatgcaatctggcttagaaaagttgggctttgaaatggccacaccgcaaggagcattctacatttttgctaagatccccgaaaaatatggcaccaatgatgagcaattcgcttttgagctggctcaaaaagcaaaagtcggtgtcactcctggtcgctactttggcaagggcggtgaaggttatgtccgtctttcttatgcatcatcaactgagcaattaaaagaaagtttagctcggattagtgatttcgttaataatttataattcagataaaaaaataagtgatctcaatcaaagcgagatcacttattttttattatattgatttattacttatcccaagttgaattttctgcagcatcttcagcagccatcttttcaagacgctcttcagttgcctttacactgtcttggtacttttcctcaacttcgatccccaagtcagctaattgttgatcagctactggagctggagcatgcatcattggttctgaagcagaagcattcttagggaatgctgaaacgtcacgaatattatccttatcagcaagcatcattgcaaatcgatcaagaccgatagctaaacctgcgtgaggtgggaagcccatgtccaaagcatccataaagtaaccaaattgttcatatgcacgtttcttagtgaaaccaagtgccttaaacatattttcttgaattgagcgcttgtggatacggattgagccaccgcccatctcatcaccattcataacaatatcataactacgtgcgtgagccttatgaggttcagtagttagcaacttaaccccttcatcatctggcatagtgaatgggtggtgagctgctacccaacggccaagtccttcatcgtattcaaataatggccaatcaacaacccaaacaaagtcataaacacccttaggaataataccagtttctttggcaaattcacgacgaaggtggtcaagtgaatcacaacataccttccacttatcagctacgaatactactaattcgccaccttcaagatcaaattccttcttcaaagcttctttgttctcatcagtcaagaagcgagcaacagggcctgaaaattcgccatcttcaaatttaacccaagccaaacctttagcgtggaatcgtttaataaagtcagccttcttgtcaatcttcttacgtgagtattcttttgcaccatttttaacagcaattcccttaacaaaaccgccatcagcaattgcaccggagaagaccttaaagtcactatccttgaaaattgggcttaagtcatgaatcaacataccgtaacgagtatctggtttgtcacagccatacttgttcattgaatcagtccaagtaattcgcttaattggagttttaagatcaatgcccttgacatctttcataattttcttcaaaagaccttcagtataactctgaatagtttcttcatcagcaaatgacatttccatatcaatttgagtaaattctggttggcggtcaccacgtaggtcttcatcacggaaacaacgagctaactggtaatacttgtcaaatcctgcacccattaaaagctgcttgaacagttgtggtgattgtggcaaagcgtagaaactacctggatagattcttgatggtactaagtagtcacgtgcaccttcaggtgatgacttacctaagattggagtttcaatatcaataaaaccattttcatcaaagaattcatgagtagcacgcaaaatctttgaacgtaaaataattgcttgttgaacttctggacggcgaagatcaagatagcgatactttaatctagtttgttctgagacttcaattccatctttaatttcaaatggagggttcttagccttgtttaaaataatgatttcagttgcatcaacttcaacttgaccagtcttcatgtcagggttaacttctgaacgcttaacaactttccccttaacttgaacaacatattcattaccaagtgaatcggcaatatccattaacttcttaccagaatctttgttaacaacgatctgaaccaagccttcacggtcacgcaaatcgatgaaaaccaagttacctaagttacgtacacgttgtacccaaccatagagatttacatcttgaccgatgtatttttcagtaatattgccacaataatctgttcttttttcgatcttttccattgttactagtccttcaattcatccattattttagtcatgttatttagatcttcaagacttaaatcgattgtcttgccatcagctaaacgtttaatattcaaaacgccgttagccagttccttttcacctaaagtaataacatacttagcaccttcacgatctgccttcttgaattggttctttaacttcttctgattgacatcaaagtcagcttcaaaaccttgattacgaaggctacgtgcaatttcaattgccttttgtgcagtaccgtcaccaatattagtaataaagaaatcaataccgcgtttctcgaataatgcaggattttgctttttaagcaccaacatcaatctttcttcgccaatcccgaaaccaacggctggagtagcgggtccattgaattcttctaccaagtgatcatatctaccaccaccaagaatagtagttgcactttcccataagctcttatcttcaaccataaattcaaagataattccagtatagtaatcaagtccacgtactagatcatcatcaattacataatcaataccaagttgatctagcatcttcaagattgcttcaaaattagcttttgaatcgtcatccaaaaattcacgaatcttaggtgccttaggcaagaacttcttatcacgttcatctttagaatctaaaatacgcaatggattatcacgcaatcttctttgtgagtcttctgataactcatctttcaaaggagtgaaataattaaccaaagcatcatgataatcttgacgtacttgctcattccccaaagtgttaatgtgaagttggtaattcttaacgcctaactcacccaataaatcatgtcccatcatgattgtttgtacatcacttaatgggttgcttgagccaaagctctctaccccaatttggtgaaattcacgttgacgaccggcttgtggtctttcatatctaaaagttgattccatataaaaaacattaaatggcttaacaacttctggcgcatacatcttgtcttctacataagcccgcactacgctagctgttccttctgggcgaagggcaatatggcgaccacccttatcatcgaagtcgtacatctgtttttcaacgatttctgaactatcgccacttgaacgagcaaagatttcataattttcaaaacttggtgtgcgaatttcacgataatttgcgcgattgaagaaatttctggcagtttcttcaactttttgccatgaaccagattgatcaggcaaaatatcaactgttcccttaggtttttgaactctcatttaatcatcctttttatattttgataacttgattaaaaataaaaagcgcccttgaacttaatcaagggcgcttagattagcacggtaccacctttttggttgctgcgattaacgctcgccaaacgatccattatctgttaaaggtgtcacagaccgcgatctatctactctctcaccacaacgagcagtctctttgaatagatcattgctaatctacattctttgtcatcgataattcttacttagcttatatttttctcaagacattgtcaacctttgcggtctcattttttcgctaaagatctaacacaatcgtgaatggaccatcgttttctaaactaacttgcatgtcagccccaaactcaccagtctcaacgtggaaaccgtcattttctagttcttgattaaagtcttcccaaagttctttcgatcttggtggacgcatcgcatcaacaaaactaggacggttgccttttttagtatttgccatcaacgtaaattgtgataccgacaaaatttctccgttaacatcctttaaagacaagttagtcttcccctcctcatcttcaaaaatacgcattttagctattttatcagctgcttttttgattactggcaattcatcaccatttttgatgccaactaataataaaaagcctttaccaatcttgcccacagttttaccgtcaatatctacttgagcatgatttactctctgaattacaactcgcattaattatctgacctcttagtttcgtatacgtctggaatatcacgtaatttactcaaaatttcatctagttgatctgcattccgtacagcaactgtgacatacatatgtgcaacattatcttcgtttactttaccagaaatattattaatattcttagtaagtgaattcaacttattaataacgtcactaagcagattggaacgattgtaaccaaagacttcaatatttgcattaaaggattgaacactattttcctcaacattttcccattcaacatcaattaagcgaccttgttcttcagcttctttggtgatattacggcaatctgttcggtgaatagttacaccgcgacctttagttacatacccaataatcttgtcacctggaactggattacaacacttagctaaatgaagcattaagtcactaacgccttggatcatgacgccatttttatgcttaaccttcattgtagtatttgaattcttcttaggttgttcttcttgaactgcttgttgtccagaattcaaaatcttttcttccagctctttttgtttttgattttcttcctcacggcgcaaatcaaccgtcaagcgattaaccactgcttgagcagaaagatcaccaaagcctactgccgcatatagttcatctgcagtgtgataattaaagtgctctaatagcttttcaattcgatccctggccataaattctttgggtgaaagatcctcatcgcgcaacatatcagcaatcaattgttcaccatgctggatgctatcttctctatcctgacttctgaagtagcgtctaatcttgttgcgtgctcttgaagtcttcaccatgtcaacccagtcacgcgatggcgctgcattagtctgtgtcataatttcaataacatcgccattgcgtaatttatagtccaaaggaactaatttgttattaactttggcacctactgcatgactaccaacttgagtgtgaattgcataggcaaaatctagcgtaaccgaacctttaggtagttcatatacttcacctttaggcgtaaaaacataaactctgtctgaaaaaatatcacttttaacagacttcataaattcaccggcatctttagtttcatcctttaattcaaggatttctcttaccatatccagcttttcaccagaggtactttgctcaacaccagtaaaattgccacgcttataagcccagtgtgcagccacaccatattcagctactttatgcatttgttcagttctaatctgaatttctagtggacgaccgccaggcccaataatggttgtatggagtgattgatagccgttaacctttggcatagcaatgtaatccttaaaacgacctggcattggcttccattcagtatgaacagcacccaaaacagcataacaatcacgcacatttttaacaattacacgtacagccaataagtcataaatctcatcaaaatctttatgcttattaaccatctttttatagattgaataaatatgcttcggacgaccataaatttcatatttaatgcctaattcatttagagtcttcttcaaagtcttgattgtatcggcaatatatttttcacgctggcttcgcttgacatccatcaagttaacaatgcggtaataggcttcgggatttaagtagtggaaagacatatcttctagttcccacttaattgtcccaatacctagacgatcagccagcggtgcataaatatccattgtttcggaagcaatacgccgctgcttatcaggtcgtaagtgttgcagagtatgcatattgtgtaaacggtcggctaacttcaccataattacacgtagatcttgagccatggcaatcaacattttacggtgattctcagctaaaaattcttgatgagacttgtactcatatttgtttaacttggttacaccatcaacaataaaagctacatcttcaccaaatttttccttcagctcatcatttgtaactggggtatcttccactgtatcgtgcaaaaagcccgctgcaactgtatcaggatctaagcctaatgtagctaaagttccagccacttgcgttggatgaataatataaggttgtccagacgcccgtttctgtccagcatgagctttattggcaaattcatatgctttttcaacaaaggccacctggtcatcattcatatactttttgcaggtatcaattacctgatcatgcgtcatttcaatgtatttggacattatgatcatcccctctagcggtaaatatttttattcattaagccaaaagcttcaattattaagtaaattaaaccaaacattaaattatacaaagcaaaatgtggcaacattgctaagcagaaaagcacaggtaacaagaaaattcaccacttggacaggttaagtttaataattaaattgcctagatggtatgcaatgatgctgttaataataaaaaacagaattgcttctcgccacactaccggcacacggcaaatgctaaagatatacggcaaaatcattaccaaaatactccaccagacaagtgacatccagcgatgagaattcaacttcctgacaattggaattgcttcgattttatttcctagttttttcattaaaagattgtgcctctcatcaaagtttaatttaattgataatattttaccatatttatttttcttttctagtaattgctagtcccatccagcgaccttgacgcatggttaaatcgaccttaaagccattctcgtctagagccttttcaatcttaggcaattgcaggtagtcaattccagaaaagataacttgaccatcgtcgtttaaatgactatccatttgtggaatcaagtctagtaaaatttctgccaaaatattggcaacaatgatgtcaaacttgcctttaacatcagctaacaaactagtcttttgagtgtgaatattattaatatcgtttaaggctgcattttgtttagctgcagtcattgattcatctgaaatatctgtggctaaaacatcagttgctcctaattttgatgcagcaattgccaaaataccggaccctgtaccaacgtccactacattcattggcttaaccattgctctctctaggcccatcattgctaattgagtagttttgtgatttcctgtaccaaaagctaagcctggatcaagcttaattaattgctggtccttaaaagcgggtttgtaatcttcccattcaggcacaattgccaagtgacgtgaaaaatcaatcacgtgataatacttttgccatgccgtgttccaatcttggtccttaatgtatgaagttgtaattttggcatcccctacatctaggccatagctcttcaattcctttaacttatcttggaatttttttactaatgcgtctttatctgcttcttcatcaaaataagcatagaaatatgtatccttaggtaagtctttaatgtcatccatttcaactacagtagaatcatgcaaccagcctgcttgctcaaagtcgctacgctttcttgattcaatacccaatgcattcagattatctaaagcaaaaacgctcaaagcgtcttcaacttcatgactagtatcaattttaataattagtaatttcattagtattatctcctttgggattttctttgcataatgctatcatgataacaggtgataaatatgtcaaagaagaaaaataaaaagaacaaactcgaaaaaacattggtcgaaaaaatcttagaccaaaataagatcaagtatcgtcaagctcaatttgctgtctccgaagataaaggcggagttgcacaaatgaacacttctattttagaagacaaagagcgtttagtctataaaactctcgtctgcgaaggaaataaaactggtccattggttggtgttgtaccagttactgaacatttaagcatgaaaaagttagctaaagtttctggtaacaaaaaatgtgaaatgcttcccttaaagaaattagccaaaacaactggttatgtacatggcgctaatactcctatcggaatttattttaaggaaaaatttcctatctatttggatgattctatgcaaggaaatcctgaaattggtgtttctagtggtgaagttggccggagtgtctttttgaacccagaagacttagccaaattctgccatgctccttttgttgatctaaaagaataaaaagcgcttacaatttattgcgttattcttcttcttttgtgttatattaaataatgtaccgcatacagaatataacaattacatagaagaagatgacaaaaatgaatttattgttaggaattgttggctttgtagttgccatgatcgctgcctttgttgttacggcattagcaattgccaagtaaataaagcaaaaaaataataacagatttaaaatgacgtggtttgatatcatgccattttttattttttatataatagttatttattatcaaattataagtatttaatatataaggctaaactatttatactaaaaagaaaagtcttgcctataaaaaaagttgaatttatatcagcaatgttatttatttgtgctaatctaaatatgttgtcaaatgtaaaaagaacacattgataataaattgtaaaagactcagtcttttacgttcccaaaagaaggtttagataaatgaaacacaaaaatgatttgagcttcaatgcaaaatttaatggaaaacaaaaatttggttttagaaagttgtctgttggtttagctgcagttgcacttagcactacttttttcttaagtaatagtcaacttgttcatgcggatactaatactgcgactaatgaagaacaaactcaacaagattcacaaaaatctaatcaagaacagtcaaataataccatccagtcgactcaagctgatccaagtaaccaaaataatcaaagttcaactaaaaattcaccaaaccaagaaaaaacaaaacaacaaacagtcgaaattaccgctttttatacagatgaaaaaggtaataacgcttctgaaataaaaaaagatgaatcagcttctttaatggctggtcaagataccatcaatgttgacattaaaatcaaccagcctaaattagatcaaaataattctttaactattaacttgccagatactggagaaagtaaaaactatcaaattaatactggaaaaacaaagattttcagtaataatgccggtagtcaatcttactgggatattacggcagtcgatcataatgacaatagtcaacttgttgccgtttagaataattcgattagcaaagattcacccgactaccttgatttaaccatcccagctcttgctaatggatccacagttaaatcagatttaaaaaatcaggctttcaatgtagaaattgatggaaaaagccaaatcgccttcacagctgatttaacaccttacaaggataaagttacccccccaactgaattgatccatggctttgctatgggacaaaagtcattcaacggttctgatgatggtaaagtatacccagagaaaaacaatatctcagaagaagatattaaccaattaaaattaaacgatgacagtcacctgcttcaatggggaatctatttcaattatggtaatcaattaaataatcctcccctttccttgtataatgcaatatttaaagttgcttttagtcaagatcaaactttaattccttcttcaatcaaagtcttcgagattccaagtggaatgtccgtggatcaaaatgcattacggcacggaattaaggatttttacgatggagctgataagtccgatgaaaattactacagcataattgctactggaaataatgaaaagacaaaatttgcggactttttgcgtgctcatttagttaaaaatgcaactggacaagctactggtttctcagtaaaccaaactggtcaaaaattcaatcctaatgatcctagttatgactacagtacccatgcatacttcattcaattagatactgtactaagtaataaatctggccaaccaactagtagtactggcatgacctctgatacatcaaaaaatactttagctggtcaagggcttagtgctgattacaaaaataaagacgaccaatcagctaatacccctattcaatttagcaggttagaagaagcattagctttatttaaaaataagcactataaaattgaaaaagtttctggcgccaatgccacattaaaaacggacagcagtatcggctttggcaacttttataataatgaaaatgtagatcaacacttcatcatttacttagttcatgaaacgcagatagaaaagcaaactgctacagttggggaagaagtaaaaggctactatgtaaacggtcctaagagccaaaacttttccggtataaataatccagatgtggctgttcctaaaaatgatgaaacacctactccaaatgtagtaaaagaagttatttactctagaagcagggtggttgatttagttaaggatccgcaaggcacagaaacaaactggtcacaatggatatcaaacaatcaagcattttcagctattccgtataacaatactacaattaaagacataattgatggccattatcatttagataaaaatggcgtgattcacattgcttcttcacagaataaacttactgctacaagcaattcaattactgagatttccgcaattgcacctaattcggagtttttagcttcaattgcttctaccacagttaatggtcaaaaaacaacaactggcaatctagcaactattagcatttgggtaccctatagttactccgcttctaaaccggaaccaaccccaactcctattcctatacctgaatctgagactccgactactccagaacaaccgaagcagccttctgagccgaatacaccatatgagtctgaaccacctaagtctatgaatacaaacagacaaagattcacaaaaaagtaaattggaattctagcagtcatccttatggcactgatatgcaaagacagaagcaacacaaagatggaattattccaccccatggaactgccattaataatattccaaattcaacaacaaagactagaactactaataatatcgttaagtcttacaataatattagttctaaattaccacaaactagtcaaaataattctaacctgagcttaatcggtctagctttagcaacactaggactactgggatttactattacaaaaagaaaacatgattaattaacaatcgcaaactaaaagagacagaccaaaaatctgtctcttttttctaccttaatttatttaatctgcatgtctccacttcttatcagttaagatacgtgcagctaaaagacctaatggcaaggccacgacaatcatcaacgcttctacgatccaataagccccgatattaatattcgtgattccaaagttaaatacagctcgatacatgtaaagaccaggcaccataattacaattgatggaacagtaattgcaattcttggaaaaccaacttttttccttacaatacttgctaatagaccagctgttaaagcaccaataaatgctgccaaagctggagcaacctgagcataatcgactaagctaagacgtaatgtatttgccattgctcccattaccgcggctgtagctgccatttgtggtcgactgttaaacataattgaaaaaccaaacaccccacaaaagctagccagcaatcgcaagcaggttaacgtccctggatcaatttttaacttaggcatagatcctggatgcaaacgcaaaattgttgctacagcccagcctgccatcgttgcaattacgataattaaaatcgcataagtgagccgttcaagcccagagcgcatatctaacttagacatgtccaatccagatgtaataaatggaaaacccggaattacgaacaacatggcaccaatatagccataggcatgatcatgattaatgtggaataatatttctcctacatgaaaactcataaagtaaacactgcaggctatggcaaccgcaaccgcaatcttggctaccaaagttaacctgtgcttacccataattgctctaatatattgaccgcaagctgcacccaaaaaagcacagatcacctcaggaagaccgccgcctaataagaaaataaagccgccgcaggccaagcctgaactaagtcccgaaattaacggagaatacgctgacttttgctgagaaatctcccgtaagcgtttatgaatttgaccgatagtccattccccatgtcccttttcaaattgccgaacgaatttttccatttcattcaacttagtcatattcacacctgttgctggtaacgataaagtctgggaatatgattcattatcaacatcaaaacaggtatattcaattgacactaatccaatatccgttgaacaggtaatgcccaaggttctggcaaccgtatccattgaatcacgtactcgccaagcacctgtaccacagcttaaaagcataatacctactcgacctacaatcgaggtcttttcaactaatgttgcatcctgcgccatcgtattattatcgctcttgaaaaattcctcccacagaatcttcatatgatgtttttctgataaatgatgttctcgatcaatttcactcatgctattattacttttcctcacatagttcgcataattataactattatattctaccacaggaatttcatcataatttttgatattttaaaatttgctgcttctttttattattttaaatttataatagacatataagttattttgaaataaaggatgatttaaagtggctcaattaactgatgaacaacttgctaacattgctcatgacttttaccttagtcagcttaatattgctgatatctcacaaaaatatgatttatcgcgatatttaatcgctaaagcactagaagacgcgcgtaaccgtggaattgttaaaattaaaatctcgcgtggaatcaaacgcaatcaggtactagagagagaatttcagaaaagattcagattaaaagaagcttttattgtcgaaactaccggcaaccgcgatgaaaatagtgaagccgtagttaacttcgctgctaaacaaattgaaacctatctaaagcaagcaaaaatcgctggtattagttggggtgcaacaatgcatggcgtgatcaacgacttttttgagcaggacttagagcaactttactttattcaattacttggtcaaccaattaattctaaccgcaggaagaatccattggcccaagatgcggcagaaaaattgcattcccatagtctaagtctgccaaccccactttatatactaaatccaaagatcatgcctgccttgaaacatgagccttattttaaagtaattgaaaattgttatcatcacttagacatgcttttcactggtcttagtactttccaatcatttcaagctaatcaatttttgaaagaaaattatggacctgaactatttaaagacattcctgactgcgatgtagctggaatgatcatgggacgaccatataatattaaaggtgaatttttccctgacttcgaacaacacatttgtggtatcagcatgaatgacattatgaaaacgccaattcgtttttgtgtcgtccgcaatcgctttaaatctgaggcactccttggcgccttacgtagcggtatcattactcatctagtaactaatgatgcaattgcccaacgcgttttgcaaaatatcgattaattcgctaaagtaatacagagatagactatttataatgaggagaaaaaatgaaaaaatctaaatatgatttatggattggtgcactgaacctgatcaattgtgtgttattcattagctcttggtttgccatccttggagctgacttcactgctagaatagctttaatattttacttatttgcctggttcggcgtgatccttaatgccgttgcagtagtgcaatcgcataacatgaatatctcactaattgggccaattttaggagtaattggtaatgcactatatggctttaccgctgctctagccttacctgctgtgattgttaatattatttctgccttctttatctttatgcaacatagcaataaaaaatagaaaaaacagccaaaaattggctgctttttctatgctaaaatctgttatgtactggtcaacaattactaaagtggatttacaatgactgggaggtgagaattatggagtttagaattgacgaatgtattccagatgttgtatcaatgatggctttagcacaagcaattgcaaattttgacctcaatggtaaaaagccacaagatgtgaacctaggaaggatggcaaatgtctaaagtttttcgaaatgacttaaaaataaaggacatccctaatcaaagaaaacttagggatgtctttttttagcctaaatatgaaattgctacttgtaattgtgccagcttcattgccgcctgagccacattcttgcgatcaacatcaacaaaaatctcacagtgtttttcatcaaattcataacctgaccctagcgcaatatcttccgcagtttcatataactctttatcttcttcattaggatctagcttaaatagaattcgtccgccatcactaacgcggcaatgatcatcggcttcctcaacccaaacatatacggtatcgccataagaatcaatcatcattgtggcaatctgcaatgtcctatcgtcaacccaaattgtcttggttaccttagcaacatacgaacctatttcatggttaattttctttaattcatcctgcttcattttttacctctaatttataaattcttttcttcccggatttaaaattgaagtgcaacactaagtgttaaacaaaaaggccatgaagacctaaacttgaagtgaccaaaaatcaagaaaggaagatcttcatgaccaactcaaattctagcatttccaagcattatcatcaattgaacagcgaacaacgtaagtgtcaatgtttttgcggtagcctttaaaccattagtctaaccttaatttcttaaatatttatatgacttaaatttctgcttagcttgcttaaataactattgccagctacctgtgcggttaatgcgccatgctggatgcctaaatgaacttcatgacgcttctttaagctgtcacgggccgctgcttttaattcctgttcagtcaatacagttatttctgaatcttcaaactcgctgctaagccaaaattccagctctcgattcttgatgcagcttaagatcctaagcatgccttctgctccagattttgaccatttcttgccttgccccttaacacggtaggtatacttgcggtggttgctctcgcagcagccaatggctttagtcacagtcagttttcgtttcttaaacggcttaatatcgtcccaatgacgatcaatataattccttaggcgccccagataatcatgattgagctcggtattcaattcatcaattagtcggctttctgcagtggttaggatagttttaactttgtcatagctgtatttgtattccaaagcagaaatcagcttgccttgcaggtcaggcgcaaaatatagcctttctttgattttcttatttaggtgaaagacatccaagaaatgctcatgacgcttgcatagccctacaatgtcatcgaagtctgttttggcatatccagcaccgccatcggcgttgctaagaattacagtatcagaaagatcataagtattggccaggtactccttggcttcgttcagcgcatcaagtcggcttaaagaaacaaattccttggcattgattcgctttctgcgtttcttgcttatattgacaatgccttcacagacctgatagcgatgaaattccaaccggcttttagtgcctttgatcaccacgccatcgccttcaagatacaaaactgggacctttttcttagtgcctgcggcatcatatcttgaatctgcttcttggcccgctttaatatttttcccggccatttttaccaaattgcccacctgcatatggctaatattaaagccagacaggcaattgactgctagagcagtattgcgataagtggcaacgctgcttacttctaagatgtttttgactgctaaaatactgtagcgcttgtatttgtcaaagcccattaattcatccaagggataccttgcttgtttgcctgggcagacatatcttcttctgacatacctaacttcgccaaaagccatattgattgagcgctcattcttcttatcaatctgatagccctgtgctttaaccttggtaatcatttcatcatcaactttagctaaagccaaggccatgatttccttaatcaggtttaagaagaaacagattatttttctttcacgcttaatataattatcttcagactttataatatttgcgatttcagttacaattgaattcataaaagaccagcttctaatgtgttttttgttcttaacatcagactactggtctttttgtttgagctcaagtccaaattcaaaggacttgggcttttttaattatttattcaacttaccgtaaaaaattatacacttaggcgaacaacgtggacaaattcaagctctgcttgattctggcataacctcctgcaatgctatcgctcaagaagtaggctgtcataaatcaactatcagccgtgaaattagacgaggcagtgtcctgcaaagagacagcagctatgtcttgtatgagcactattacgctgatactgcacaaatttatcatgaaaagcgccgcagaaactgctataagtgtaatccactgcaacactatgccgtctttttcagaatgctaagcagacgctttaaagccaaatttgatgccactagcattgatgaattcgttggtgaatttcacaggattatgccaaattatccatgtcctagcacgcccactgtctatcgttatattgatcaaggattgctggatataagcaatatcgacctgccaatgaagcttaaaagacgcagaaacaaacgccatcatagtcatggtggccatgctccgcataaaaagaatcttggcaattcgattgaacagcggcctaaagaagttgaaaacagaaaagttcccctgcactgggaaggcgatttggttaaaggcgtcagacgtaaaaatcaacctgccttaatgacactgactgaaagaaccactcgttttgaggttgttatcaaaattcctgactatcgggccagtacttgtcaaagactgcttcaaaaggagattgacagacatcctaattggtttaaatcaattacgtttgacaatggttctgagtttgcggatatgaccaaaatcaaaggatgtcagatctactttgctcatccatattctccttgggaaagaggcacaaatgagaactgcaatggacttctgcgtcaattcttccctaagggcaaaagcatgaaagataagtcagctgcttatgttcaacaggcaactgatgccattaaccgcaaacatcgtcgaatcctccaatatcacacagcagaagaactcttcaagcaatacgttccttcatagcctaactgttgcacttaatttgacaattcaggaaattcttttctttaatataaggataccctcttagtaattcttctacaaatttattaaatagattgaatctcccaatcagcttgactgttaccgcttactaattataccttgtaaatatactaaattttggagaaaaatatgcatactaagggtttatcagttaaaaatgttgtagcgatcggaattggatcggcaatctatgttattttagcacgtttcacatcgattcctacgcctattcctaacacaaatattgaattagtctttccttttttggctctttttgcgtcaatctatggcgctaaggtcggttttattgtcggctttattggacatgctttgtccgatttcattatgtacgggcagacttggtggagctgggtattagctactgctgttttaggctggatcatcggtttagcggccaaacgcttagacttaaaaaatggtatttttggtattaaacaaataatcttttttaatatcattcaaattattgccaatattctcgcctggattgtagttgcaccaatcggtgacattatcatctatagcgaacctgctaacaaagtttttgtccaaggaatttcggctacgctttctaatggtattacaattatggtcattggcacgctcctacttaaagcttatgctggaaccaagattaaaaaaggcagcttgcgcaaggaggattaaacaatgcctaaaacaattattgaattcaaagatttttcatttaagtatgacagtcaggccgagccaacactaaaacagattaatctaactatcaaacaaggtgaaaaattgttaattgctggaccatcaggttcaggtaaatcgaccattggccgctgtattaacggcctaattcctaatctagatactggtgagatcaccggtgaatgcactattaacggcaagaatattaaagacactaacctatttgatctttctttcaccacctcaactatcctacaagatactgacagtcaatttatcggcttaactgttggtgaagacattgcttttgctttggaaaacgactgccaaccacaaaatcatatgaaacaagttgttcatcgctgggctgatgaattagggattgagcatttattaaagcaggcgccacaaaatctatctggtggtcaaaaacaaattgttgctctagctggtgtcatggttgatgaatcaccaattttactttttgacgagccacttgctaatttagacccagcttcaggaatgaaaacgatggctttaattgatcgcattcaaaaagaattaagtgcgacagtaatcattattgaacaccgtctagaagaagttttgagtcagcctatagatcgcattatcctaattaatgatggtgaaattgtagctgataagaagccaaatgatctattacatgagaattgtttagaagacgttggtgttcgtagtcctctttatttaaatgccttaaaaaaagctaacgtcgaccttacgcgtattcccgacctaacttcagtcgctgctttgccccaagatcctgaaattgctaagcagttgcaagaatggcaaaacaacattaccctaagtggtgaaaaagaagagactcatcctttattagaactcaaaggcgtcggccaccgttatagtaaattgcagattcatcctttacatgacgttacagcgacaatcaatcaaggcgattttgtttcaatagttggtcaaaatggtgcgggaaaaaccaccctttgtcgaattatttgtggctttatcgacaatgagggacttattttatttgatggtgataaccttaagcagttttcaatcaaagagcgttccgataagattggttatgtcatgcaagatcctaaccagatgatttcacaaaaaatgatttttgacgaagtagctctaggcttgcgtctacgtggttatgatgagcagactattcgcactaaggtctatgatactttgaaagtttgtggtctttatccgtaccgcaactggccaatctctgctttatccttcggtcagaaaaagcgagtcacaattgctgcaattttagtgcttaatcctgagttattaattcttgatgaaccaactgcagggcaagattggcaaacttatactgagatcatgaactttttaaaacagcttaatgatcaaggcaaaacaattatgattatcactcacgatatgtacttgctgatggaatacactaacagatccctggcttttgctgatggaacactaattgctgacacagatccaatcaagttattaactgaaaaagctttaattaaaaaggctgctttgaagcgaacctccttatataatctcgctatcaaatatcaattagaaaattcagatagctttgtccgcgcctatattgatgcagaaagggatgaaaaacatgcataatgaaagccaagttttaggttatcaacctggtgattcttttatttatcaattaaacgcaaccactaagttagtttttatactcctagtctcggttgcttgtatggtaacttatgataccagattcttaattgctatctgtattttatcaattttcttgtttaaagaggcaaaaattaagtggagccagatttcttttatcgtgaaatttattgtagttttcatgttgctaaatctgatttttgttttcatctttcagccaagctatggtgaaaatatttatcattctaaaagcatcttgatccatgccggctacttcacattaacattgcaagaggtattctacttattcaatcttttcttaaaatatgtctgctcaattccaatcgtattgctgtttctattaactactaatcctagtcaatttgctgcttcattaaataaaatcggcattagttacaaaatttcctatgctgtttctctagctctacgctacatcccagatatccaaaattcttattgggatatctcagctgctcaacaagcacgtggcaatgaactatccaaaaaggctagtttaggcaaacgaattaaggggacattgaatatcgtgatgcctcttatcttctccagtttggatcgaatcgatacaatttcaacagccatacaattacgccgctttggctcaaagaaaaaacggacctggtatgtcacccaatcatttaaaaaagctgattatcttgtaatgatcgtagccgtgattttggtattaattgtggttggtctctggcaacttgatcatggtagattttataatccatttatttagactaaaattaaaaggacctaatggtcccttttttgttttcgatttttctgtttatgatcatcttgagtgacaatctcaggtttcttaggaatcggcggcgtgattatttcataattacgcaaacggtgttcaagatagtcatctaatcgctcttgcgtattttcatgtacaataatcattaaatcacctcacttttcataattatacctcaaaaatgtaggttaaacagcgtaattactaagtatgccattccactagcaatcacaggacctgcagctacacccttgaaaaccactactccaataatagtacctaaaactaatgcaaccgtcacctgtggcaccgctgctaattgatcaacaccataacgtgacaagatagctacagcaattcccgctaaaatggcaatccatccagctggcgacttaaaagttttaatcagatccttaaagccaatctgtcctgtcgcaataggaactagaattgcaaccgaaataatagttacgccccaattaatcccctttgcttgaatagtaggcagccatttactagtaaacggtaataatttaaacaccattaccactcccgttgcaataattaatgacatgtttttacccactaacgctacaactagcaccaatgctagaaataaccaactttccatatttatctcccctcaaaaaatcattagcattagttcactttaacaaaaatattcatcaaaacaaaataatgagtctaaataagtgaaaatcaatctaatttgtgtcataataaaattactcagaaaaatatatgtatacgcgcacctcgttcttaaaacgaggtgttttttacgcaaagaaccagtgcagatattttaccttcactagttcttcttagttgatcgatattgcgatatgactttactactgcatcgtagttagaatttgcaaatatttatgcttgaaaataaaatatttgcacaaataattaaaaaacgtttcttgcaaaaatacaactaaacattttaataaaaacaaaaagatgccactttcgtgacacctttgtgattacttattcatacatttcgttttgaactaatccctaacttccttaatggtatcaatgatagtaccatcacgatactcaactaaggcaaccgtacgatcagtatattcaagtggctttggtacaccaacttgtttttcagcaattttttgcaattcattaatatccaagatcttaagtcctggcaccttactaaaggcatccactaaatcctggcgagctggattaatggcaattcctctttcagttactaaaacatcaattgatgaacctggagtaacaatagtttctactcttggaacaacagtcgcattacgtccccgaacaagaggagctgtaataatcgtcatcttggcaccagctgcggaatcttggtgaccaccgacggctccacgaatgacaccatctgagccagtcataacattaacattgaagtcaatatcgatttgtaaagctgacaagattgaaacatccaagttgttaaccactgcacccttattatgaggatcagcataccaagaagcatcaatttcttgttgatttttattgttagccattgattgggcagcacccttatcaaagtcctgcacatccataacttttctgactagaccttcttcaagtaagtcagtggtaggtttagtaataccacccaaagcaaatgatgcagtaatgccatcatcaatcatactttgacgtaagtacctggtgacagctaatgcagcaccaccagaaccagtttggaagctaaacccttgcttgtaatatggagagttaatgattacctggttaaccatttgagcaatcttgagttccttaggatccttggtaaagcgagtggcaccagaaccaatcttgtctggatctccgactttatcaattttaaccacataatccacttgatcttgctgaattgacgcaggcgtatttggataatcaacaatattatcagttaataaaacaaccttattagcatagcgagcatccattagggcatagcccaatgagccgaagacagcatccccatcttgaccgttagcattacctgcgggatcagatactggcacacccaagaaggcaacatcaaccttaatctcgccttcttcaattgaacgagcacgattaccatgtgagcggaaaattacaggattcttcaagccgccatgtgaaacaaaatcacctagtgaaccgcgcatacccgaagaagtaatattagtgattactccctttttaatcgcttcgataactttatcattcataacaccagtaagtgaacttggagccaaggttaaatcctggtaacccatactaataatcttgtccattaccaagttaaaaacataatccccatttctaaaatggtggtggaatgaaatagtcataccatctttcaggttattcttgattacctcatcaagtgaatcaataatcttattttgtccagtagtaactcttacctttggagcaacccgcttaacttcaggatgaccaatttcagtagtttcaaatggtttcaaattcatttttttcattaaatcatctggtaattcgcgttttactttattctccaatgtagttaccttctttatcaatcaagttagaagctttcgctgtttccaaaaccctggtagccttttctacaactggcttatcgatcatcttaccattaagtgaaataacgcctgagcccttagctttggcttcacgaatggaattttcaacattcttagcttgctcaatctcttctttagttggattaaagaccttattaaccatttgaatttgacgtgggttaaccaaactcttgccatcataccctagttcatggatatagttagtttcacgatagaagccttcagtatccttcatatttgagaacaccgtatcaaaggcatatacgtctgcggcccgagctgcttgtaaaaccatgttacgcgcaaattccaattcgcgaccatctggataacgatgagtatgcatatctgcagtatagtcttcgccagataccgccaagcccatcattaaaggcgttgcggttgcaatttctggggcatttaagacacccttggctgattcgatggcagccatcacgccaatagaaccattttcaatgtcaaattcatcttcccaatgttcgatatcctttaccaatttttgaatcattgcagctgattcagttttaggcaagcgaataacgtcaacgccggcttttaccattgccttaacatcttcatcgtaaaatggcgtggcttgaccattaacacgaactacaatttcactgccaccgaaatcgactgtcttaattgcctcataaaccaacattctggcagcatctttttccgttaatgaaactgagtcttccaaatcaagcataatcgaatctgcaccataaatgccagcatccttaatcatagctggattattaccaggtacaaacatcatggttctacgcaaacgattcttaacgtatggcatttagagcacctccaaatctggcttgtctgaagtttcggttgcacgttgtgcagctgctaaagtacgagccttaattacacaatccagtgctcccttatcggttgctttaaccttggcattttctaagccataagcttttaaggtgtcagtaatcaccttttcaatctgatctccataggccttttttacttctgattcaaggtcaatctcaatgccgttagaaccctttgaaatcatgatttggatatctgaactctcaagtgttcccgcaactgctgtggttttaatttccatcaatattcattcctttctcaattttagactgcaatttctgcatgttttgcttaataaattcataagtcgtttccggcacgaatttattgatctcttttaaattgccatccttgatcagctgtctaactttagtggcagtaataatttgaccgtctttttccaagcgatcaattacgattacttcaatctcaggaccaagctcatgcgctaggctaacattataaaagtgagtcgttcttgaaattggttctttaccaatataacgacgggtaatgttcagtcctggtgcaatttgattcttaaagacagctgcgtctatcaccgtttgtacagcaattaaatcgtcaggtgattttaagaagtatgctggaaaagtagctggtgaaaccatgtagtctccgccagagattactttcacattactaaactccttagtaccttcttgcaccaatttgaagcgctcatcaaagctaaacaaagaaacatcattagccacaacaaagacataaaccaaatcgttttcttcactagccatcttaatcaaatgttgatgacccaaggtaaacggatttgcattcatgactattgcagcgaccttcttatgctcttgatctgctatttcgggcacttcagccacaaaatccttcacatcaggcgttccattttctaaaaaggctgcctgatccgtcttggctaacaaattgaagtgcaagtgctcaaagctagttgcatactttgctttagtaaagacaaaggaatggaaaattccatcattagtcaaatattgcgttaaggctgtaaccgctttattaaagcgagccccctgcgtatcggcatcattcttgactccgatatactttaagacattaccagccacactaccagtaccaactaaattgccttcctcatcttctagcccaatagtatgatcaatcacgttaacttcgcgttcactaaaatcatttaaccccaatgattccaacaagttttcccatttttgcctagttgtagcgtcgtttaaaaacaaatcaacgactttatccataaatatgccgccttactatttcggtaatcgttttcacaaatatagtttactctcttagtttgattatttcaatttatctattaattttttgaatttttcaaaaaattcagcaataatctcatgcgttttttctggttgctcagcctgaggcaaatgcccacattccggtacaatcgccgtttgaacatcttgattcagcatttttatcgcttgagtaaattctggattaaaaaatggcgatttttccccagcaattaccagcatgggaaccggcgtatccaaaatcatgtcacgccaatcttgctccgcatgttcaactaaacagttatagttttcggctggatcatatgggaattcttgatattcttttttagcagccaaaaacattttttcatcaatgtgatggtaacaagccttgccaaaatcaaatttaagcatgtcaggataattatcccaagttaggtctttaaagccatacttccagctcttatccgcaatcatctttggtgactggtctaaatcaaccattgcctttagtctacctttgccataaattgacaaatatgcccaaatattggcagcccccatggaatttccaatagctactacatcatgcaaattgagcttaactaatagctcctctaagtcaactgcatgacgactaatccgctgtccacgataggttcgttcggactgtccttgattgcgtggatcaagcataataaaacgataatcatttttaaataaggcaattaaatcttgccacatttgacaagatccccctatacctgggatcccaatcaaagcaggcttatcttcatcccccgtatcggtataatgcaaaattacatcgtcattagttttaaatttcatctttaatcttctttcattttgattactcaattctattatgacgcaaaaaaagcaacctggtgattccagattgcttattttttaccataaaccaataatcttcatccaaagaactccgacagttccaaaaataatcatatagattaatccaaggacaaaattcatcttccaccattcaccttgtttaacatagccagtagtagccaaaattgaggcaggaccattagcatagtgagtggttgatgcgttgattgcaccagtaaaggctaaaagcattgcggaaaggcctaaaggagcaccagttgcaaccgcaacagacaagaatggcaaataaagagcagtcatatgtgcagttccacttgcaaagaagtagtgggtgtagaacaaaagcaaaactagaattgccaatacaaagccccagctaacaccatgaagaccattttgaactaatttggagaaccaatcaataaatccgtatgaaatcagcttaccagccatgaacatcaggatagaaagccaaatcaagatattccaagcaccagtttctttcagagcatcctgcattgttaacacaccggtaatcatcaaaatagttacagccaggaaggcaacaaaagtcgcatctaattgtgggatcttaaagaaaccagacaaaacccataaaacaattgaaagaatgaagactgacatcataattttttctggagttgacattggtcccatttttgctaatttttcatcagcccatttcttagcatctggagtttctttaatctcaggtgggtacatcttgtaaataacaaatggaatgattactgccaatacagcaacaggtacgattgcagtgaaaaaccaacctgcccaagacatttgatagcccttttgtgcggctaattgttgagccaccatgttaggagcagcaccggtaataaacaaagccgttgataaaatattggcatgaaaggcagtaaagtcaatgtaggcaccaatctttttacgagaagcatcatctggcttagaatcgtagccttcttttgaaacagattcaacaactggccaaacgaccccacccgtacgagctgagttcgatggaattaaggcaccgagaattaattccaatccagtaatcgcataaccaatacccaatgacttcttaccaaatttttgaatcataatataggcaatacggttacctagacctgttttactaataccatgagccataatgaaggccatagcgattaaccatgcagcagagttaccaaatgaactaagcacgccttgattaactaccataccttttgcatttgtaacgtccttcattggtgctaagccaactaaaacagttactaccaagccagctaaggttgtaccaccaattggcaaaggttttgtaatacaccctacaattgtggcaacgaaaacggcaaacatttgccatgcctgaaccgaaaggccacttgggcgccatggagtaatacaccacaatacaattccaacgatcaaaggccaaataaagcctttataattcactttttctaaagttttcataagaatcccctattctctatggacgatacacatcatcaatgatgtcaaagcctttatctgctaagcttttatctacccaacttaaatcaacttctcctttgctaaaggcaattgctttagcctcatcctgctcatgaaaagcttgtgccttaggcaaaatctcaggagcatctttacgtggaatacaaattactccatcagcatcccctaaaatcacatcacctgggttaacactaacattcccacaagcaacaggtacatttatttcaccaggtccttctttatatggtccacctggggtagtactggttgcataaatcggcagtttccaatttcttaaattatcaatatcacgaattgggccaccaattacaatacctgcaattttcttttgatcgcgtaagtaagacatcattacctcaccaatcaaagatctagtgttatcaccctcgtcgtcgatgacaatcacatcgcctggctggcaatactttaaagccgcataaattgctaagttgtcacccgccctggtgtgaaccgtaaatgcgggaccaaccatttcctcatcaggattcgacattaacttaattataggattcatagcacaatttcgttccatgcaatccgcggtattagaagctgggatctttttaaaaccagctacaacttttggatcaggcatttgcctctttaaataaattctttttcctacaggcatagagtagctctcccctctttatgctccctaatctatcttgttattgttaaacaagcctttttataaaaactaaaactcatcacaactcacaattagtattatacacttatcaatagattaagcggttacaaattttgaattattttgattttttgcttattttttgaattatttaaactcaaataattatgcaaaaaaagagaactggctaattaaaccagatctctttacttgatctttgttattttgatcttattcaccaaagttttcccaaggcattacatcgattgcaggttgatcaagcaactcttgcaattcttttggtaaaaattctttcttcacaatcacatcataaacatattgttcaaaccaagcttgactcatttcgtagaagcccttgtgaccaaacttgtcgccccatgagttttcaaccttccacttacggatatgaccgttgtcttcatcaacaccgactaaagtcatatcgtgagtagcaaagccctcaccagtattcaaacgatcagccttgctcatttgcgtatcaacgtcaaataattggtcagtcttgtacaattcagtatccaaaaagccagtttttctttccatttgctttaaaacgtcattaccaaagctgactgcttcacctgccttaagttgcgccactgcagcttgagctaaatattcaattggcacattcaagtatttgacttgatcgccgccagccacattgtcataaagtggcaagtggtaaaccttgttatattcatggttaggaatgttggacaaagcaacataatcatcgaagttgaagtccttaaagtatttttgaacaaatgcttgtggagtcaaatcacgctccaaatggtacttcttatcatcatcacggtattccaaatcaaatttctttggtggttcacccaaggcaactgataccatgcgataaatttcgttcaagaattccttcttggtcttttctgcttcatccctcttgccttcattaactaatttacgcaaaacaagagcgtcttttctctccttacgagctaagttttcggctaaagcagtagtattattagtattaaagctttctggcattgcatatgaaggtaccacgccatactttttaactaaattaatggccatggtccaaaggccaccatcttcaccggcaaactcaagccatgcttgaacatgacgatcagttaaaggtttatctgccaaacgaataattgcattgtaaaaagcgttagcacgttcaatcttgtcccagaagaaattataagcttgtgagaacgtaaaatccttgaccttgttttccttgccaaagtagtggcgcaaaacattcaaagtagtgaattcccagcaacgaccagaatgcttctgatcagttacaccgccaatatcaagttcagttgaaaagacatggttaagtcgttctgatacgcggtcattaaatgaagcttcaagcaaaccactacgacgagcagcacgagaagctactttattctcaggattagaattaaagctttcagaaaagccttcaatttcttgttgtgaaataactgtcatgatatacctcgttaattcttatcttttaattttttattaatcttttcttatataatactattttctagcttttttgtcattaagaaaaagtcctagtttttgacaactagggcttttaataaaattaatgatcaattaaaggtttatacctgacaaaacttcttgcatcttgtctgctgagttaatcatcttagcatgctcagtatcggaaagcttagtttcaattaccttttcgatcccttcaccgttaataacggttggggtacctaagtaaagatcatgcttaataccgtattcaccattaatcggagctgaaagtggcaaacaaattgcacgattgtccaaaatagctgagacaatttgagtaagcatcattgcaacaccgtagaatgtagcacctttgttggcaatgatcttgccacctttcttacgcacatcggtctcaatttctgctagaacatcatcgttgatttctgagtaatcacggagtgccttaccagcaactgttgattcatcaaagttttcaaaactagtatcaccgtgttcaccaagaaccattgagttaaccttagcaactgggacattcaaacgctttgaaagttcaacacgaagacgcattgaatcaagtgaagtaccagtaccaattacacggttcttagggaaaccagacaacttttgggtcaaagtcgtcaaaatgtcaactgggtttgcggaaacaacaaagacaccattaaatcctgattcaactactggcttaacaatactttccaaaatcttaacgttcttgttaaccaagtcaagtctagtttcacctggcttacgaggaacaccagcagtgatcacacaaacgtcagcatctttagcatcactataatcggctgcaggatgaatattggtttgacccataaatggcgtaatatcttcaaggtccattgaatcaccaacaggacgatccttagctacatcaaaaattgctaattcatcaacaattgtattttgcaataagtcatttgcaaaagttgaaccaacagcaccatcaccaacaagaaatacttttctactcataagttaaattagtcctttcaaatgtttataaactgttttttatctacatgattaattatacactaagcgctttcattagacacgatttattccataattataaattataatatcccatcaaaatctcgccagtgttattatttctatcgaaaaagagcagttaaccaaccgctctctttacataatctttcttatattatttactttcacgaacatatttagccatctgaatacctgcttgacgaccaaaaataactgtttcggcaattgagttaccaccaattcgattatttccatgaagtccgccagatacttcaccagctgcaaataatccatcaattacattaccattagtatcaagtacttgagtttcagtattaatatgaataccacccatagtatagtgaattgctggatgaacatgaattgcaaagtatggaccacgatccagttcacgatccatcccagtcgttctgccaaattctttatccttaccagttgcaacggacttattccaagcggcaatggtcttttctaagttggcaccatttacgccaatttttttagctaaatcagccaaatcagtaccatgttctactaaaccaatctggtcataaaactcaactgcagcaaaatgagcccgtacacctgagtcaaaaatcaagtatgccccatcttcatgcaaattagtaattgcactagaaacaatctttcgtgtacttaattcattaacaaaacgttgaccattcttgttaactaagatagcaccttcaccgcgcagaccttcaccaattaaataaacatgcggattatcagtatctgcagttgggtgaacctgaatgaagttcatttgcattagttgagcatcaagtgcttcagcaagcttcagtccatcacctgtagcccctggctgattagtagtcttatagtcaactaagtctggacgatacttcttaatgatatccttggaagcaccaaagccaccagtagctaaaagaaccaccttagctttaactgttttaatgccatctggtgtctcaacttcaacaccattaacgcgcttcttagcatcttgcaacaacttggtaactttagcaccagtaaagatgtcaatacccgcttttttcacctgtgttgtcattcgtgaagttagataaaatccaactggttccattgaagcaggacggtgagcacgtttcttactcatccctcctgtaatggtcaaatcagttaaacgaataccatatttcatcaaccatgaaatagctaaagcagagtggttaacaaagtacttcaacatggcacggtcatttaataaacctccaccttttaaagtttcttcatagaagtcacggttattatcaatgatcccttcgtcaagctgaaccaaagattcagaagcgttcattccacttgaagcacgactagtgttaccaccagttttctcatttttttcaagcacaacaacatttagacctagttcatgagcttgaagtgcagcagtcagacctgctccgcctgagccaacaacgatagcatcatatttattctttaattcttttgtatttggcatttcttactttccctattcttctggagtagacttatcaacattagtcatttgcatatagtccatccattcatcatattgttcttcagtaactttaccactcttcaaagcagcttctcttaaagtagtgccttctttatcagcagtttgcgcaatcttagcagcagcatgataaccaatatgtggcgacaaggcagtaacggtcattaatgaattctcaagtaattcatccattctttcttcattaaccgttaagccatgaatcattttatcagcaaaaccagtaattgtaccagttaaaatatcacaactatctaagaatgatgcaatgatgactgtcttgaagacgttcatttcaaaattaccttgactagaagcaaaggtaatggtggtgtcattaccaaatactttagcagcagccattgtcacagcctctgcctgagttgggttaactttacctggcataatacttgaacctggctcatttgctggaatatttaattcatggtagcccgctctcggacctgaagcaagtaaacgaatatcttgcgcaatcttaaacatatcagcagccaatgttttaagggcaccatgaactacatcaagacctgaatggtgagctaagccccagaatttattagttttaacttcaaatttatgaccatagacttctgataatttaccagcaattttttcggtcattcccggtgctgcattcaagcccgtccctacagcagtcccaccaatagctaattcgtagagagttggcttcaattcacgaatatatgataagtcatgtttaagagcagaaatatagccagataattcttgaccaaaagtcaaaggcgttgcgtcttgtaagtgggttcgaccaactttaacagtcttccaatatttcttttctttaacaactaattcatcaattaagtgttgaattgctggttccaacttgtccaatgcttcaacggcaacaatattcattgcagttggataagtatcattagatgattgaccacggttaacatcatcattaggcaaaatatctaaacctgggtgcaatttattagccaagttagctacaacttcgttaacgttcatgttgctttgagtacctgaaccggtttgcaaaacatgaagtgggaagtccttacgcaagtcagtatcgcttaaagctagcaaatgatcaattgcatcttcaattgcttcgcctttttcttttggttcatcgccaacttcaacgttactttctgcagctgccttctttaagtgtaaaaatgctcgaataatttgcaatggcatcaattcaccacttgggaagttattgcggcttctttcagtttgagggccccataaagcatttttagggatcttaactggaccaatagtgtcactttcaacacggtattcttcttcgctcatattatattcctccttattaagctctataaggtttgcgttaattatcaatcaccatttataatacctgtaaaggctttctttttcaatttcattccaaaaaaagacccaggatttttcctggatcatagttttatctagactggtgattcattcttttagcaaagaagtcaccaatgatttgaacgataaaaatcaaaataattactaatacagtagctactaaagtaacatcattattgaatcggttataaccgtatgaaatagcggtattacctaaaccaccggcacctacagcaccagccattgcagtcaaaccaatcaaagaaataatcgtcaccgtcgaaacacgaatcagttctgagcgagattctcttaaataaacatcaaagataatatcacgcgcagttgagcccaaactttctgcggcttcaaccttacctgggtcaacactttctaaagcaacttgcacctgacgagcataaaatggaaatacgcctaaagttaatggtactaaggctgccttcattccgatctgtgtacctacaattttttgagtaactggtgcaacaaaggcaagcaggataatgaacggaatcgctctgaagattgaaactagcttatctgagaaattgtaccagaatttattgggccgaatcccgccatccttagttaaaactaaaatcacgccaaagataataccaagaatgccaccaaagatagctgaccaaaaagtcataaataaggtctgaaaaatactagtgccccagccagcgtctccgccccagccaagttgaacaacattgggtaaatatttacttaagaaactaatcatgatatacattccccttttcatctaaacgtgtaaatgtcacattttgcttagccaaaaattcttgtgtttgcttttgcttagctggatcgcctttcaccaataccaccaaagtaccaattggctcttcattcaaaagttcaacattcccataaagcattgaaacttctacgccaatttgcttatacaattcaataatgattgatttagtcacattagctacgctgtaaactaattgataaattgcttcatttttgccaagcttatcaagcgccaatgaattcaaagtagaaatcgcttcaagtgatccaccaacaaacttcttggttaaatcctgcttaggatgtaagaagacatctcgcaaactgccgtcttcaatcacattgccgtgttccatgacggcgaccttagtggcaatcttcttaacggcatccatttcgtgcgtgattaagatgaccgttaagtggaactttttgttcaaacgcttaagcaggtccaagatttgttgcgtattttgtgggtccaaggcactggttgcttcatcagagatcaaaatatctggattattagccaaagctctagcaatcgctactctttgttgttgcccaccagataattcagctggataaaagtcagccttatcttttaagtcaaccagatcaagcagttccaatgaccgtttttctaattcctcatcactcaacttttcatgttttaaggcaaaggctacattttctaatacagtcgtttcatttaataggttaaaaccctggaagatcattccgatgtttctgcgctttaattgcaattctttattagaaatcacctgcttgccatctttaacaaattcagtgccatcaacggtaatactaccggcagttggtttttgtaaaagattgaccgttctaactaaagttgacttaccggcaccagagaaacctacaattccataaatgtcgcctttttcaatggaaagagaaacattattcactgctttaactggttcgcccttcttctgagggaaggccacttctacattttttaattcaacaatactcatttttgatcctccttacttcaacttaacgtcccaggctgcaatttgcgtattgccatagtattccttagttagcttcttagtttctgcagtttggtaagccttgacgacatcttggtaaagcttgtccttttgttttccttgtttgacacaaagaatgttaatccattgttttgaatctttgttaattggttcaatgtaaatcgtttgcttatcagtcaagccagcaggaccagcataatcattatttactacagaagcgtcaactgaattcaatactcgactagtttgttcagcaccgatttccttaatcttgtagttatttggattgctggtgatatcagctacagtaactaaggtcttacccttcttcaacttaattaagccagcatttttcaaaacaaacagtgctcttgattcgttagtagcatcgttaggcactgcaatcgtggcaccatcaggtaagtcactcaatttatgatacttgcgtgaataaagtctgatcggtgcgatgtaggttctaccaatggcgacaacgccaccgtgatttgccttattccaatcctttaagaaggcatagtgttgaaaagcattcatgtcaatatcgcccgacttcaaggccttgttaggttggttgtaatccgtaaagttcttagtttttaaggtaataccatatttttccttagccgttttagcaattgacttccaaattgcggcttcggctttactttccccaacgattccgactgtaacagtttttgcctgattttgactgggaattcctggaccaaaactaaaccaacctgcaatcacgatcagtatcccaatgatcgtccaaataatggtatttcttcttctccgttttctcataaaatacactcctactttgataaaaataaaaaagcacccatcccaaaaggacgagtgctcgcgttaccacctttaattcgctgatcacttacgtaatcaacctcactggctatcaaaaaatagcctgcactgttaacggatgcagccccgccgatagctaaatatcaccaccggtcatcgttccaaacccatattcactagctcctatttgccaactttcaccaccacgctggctctctttatcaatagaagttctagttactcagtccttcaagatgttgttttcttgatttgttataaataagttatcatcttcttttaatctagtcaacatcttttttaatttttattagataaaagcgatttcattgtataattaggatatagttaaataatttatttttgctaaggagaaaaaatgaagaaaaatcgctttcgaagttttgctctctcattagctgcagcaattggattcatttcttttgctaatactaatgtcccatgcaacaatcaaaccgtctatgctgtttcagataaagcattggtcaatttgaaataccacaacaaagaaattgtgaccgttgatcatgatcagccgcagttttctaagagtacattgagcaagaaaaaaggtccatggcaaaaatatagccaattagattatttgaaccgagctcatgctgctaatgctttactaaataaaagattaatgccacatagtcagcgtgcggctttaacttggaatccgaccggctggcataataaacgaatcgctagtggttggttgtataatcggtgccatctaatcggctatcagttgactggtcaaaacaacaatccacgcaatttgattaccggtacgcgtgaattaaatgatccggatatgcttaaatatgaaaatgaggttgctgaatatttacgtagttcgagcaaaaactatgtccgctatcgggttactccaatatttaaagggaatgacctattagctaacggcgttgaaatggaagccgaagcaactagcaaaaacgggcctcgctttaatgtctacatttttaatgagcaacctggtatgttgcttaattacaagaccggtacttctaaggttaaacatgggtctagtactattgctgaacatgtaaaatctagaaaacgatccacttctcgagtaaccaagaaacgaaccattcaccatatcaaaggtactgtatccactgcagaacaccgagtcgttggcaatcgtcgcagtaagatctaccatgtaatgaatgggcaaaattatcatatgtcatcagctaatgcagtttacttcaacagtgaagctgccgcacaagctgctggatatcgaaaatcattaaggtagtaaaaaagtcagagcaaaactctggctttttcattatcttcttatttcacattatttttgccacgatcatatgcttccttgaattccgcaaaagtcatgttctttcctttttgatcaaagacaaccaacacttcggcgattccatccaaaattttagataaccatctaaagatagtcactgccgcacagaataagaccgccaaaataaataatgatttgttattaagcattgtcaatgagaacaatcttgggaaaaagatagttgagccaataatacagataactgataagcccataacagcaagtctaaatttgtttattggtgccgaaatatgatacatcaccataaaaccaactaagactagcaacatagtcgctgtcgtgcctacctgaccatgatcaagtgagatagaggcccctgcaatgactaaaattgcaactgccagccaatctgttaagccccctggaattgcccgagctaaaacatttggcataaactttccacgaattcgcttgtggttgctttctaaggccaataaaaacgacggcaagccaattgtaaatgcagagatcaatgtgatctgggctggctgcagcggataattgattgtcataatcaaagagaagatggccatcaagaatgaaaaaatatttttcaccaagaacaagctggctgaacgttgaatgttattaactacttgcctgccttggttcaccactaacggcattttagcaaaattagaatcgagcaaaaccacttgtgaagcttgcactgcagcactattaccagaagccatagcgattgagcaatccgcctttttcatcgctaaaatatcgttaactccgtctccagtcatggctacggtattaccttgattttgcaaagcaacgacaaactttcgcttttgatcaggcttaacccggccaaagacattatagttttgcatggcctgctcatattcaccatctttaatggtttgcgcatcgatatacttatctgccccattaattccagcttgcttagctactcgagcaacggttaccggattatccccagaaataaccttgatatcaacaccttgctggttaaaatattgaaaagttgacttggcttctttacgaattggattcgacaataaaatataaccgagaacttgtacattttcctttaaggcggaattatcttcagttaatatgccaggataattagccgcaatcaacacccggtagccttctgccgcatatttttcaaattcagtttgatattgcgcaaattgatcacgcaaaaccatttcaggcgcaccaattaaagttgtctgattgccaaaaattacaccagaatatttattaactgaggtaaaaggcaaaatgctatccgccgttttggttccatctttaaaataggcttgaatcgccttcatcgtcgcgttatcagctggcatgtttttagcaaaatccgcaatgatgctacttaaatcaccagtaaaattcttgctactaacagctttttctacggccatcttcggttcggtaattgttcccgttttatctacacaaaggacatttactcgggctaaagtttcaacactcttcatatcgtgcagcattacttcttgtcgcgctaatcgcatagcagctagagctaaggcaatcgtagtcaataaatatagcccttctggaatcatcccaattaaagcagcttccatggaagtgatactacgcttgagtccaatattattcaaaaagaaactctgactaaatagggcaattcccaccggaataatgatgatgccgacccatttaaccagacgattgattgaacgcaccatttcagattgttcaacactgcccattgcctttgctttgatcgttaatttagaaatatatgagtctttacccactttttctaagacggcataagccttaccggaaactacaaaagaacctgacattaattctgcgtctttagtcttagtgatttcatcagattcacctgtcaacaaggcttcattaacccgcagctcacctgagattacccgcgcatcagctggaatctggtcaccagtttgtaaaagaatgacatcatcttgaaccaatttttcgatgggaattttttcttcttgcccatcacgcaccgcgataatttccgtcgcattcatcacgtttaacttgcttaaaacttttttagcacgaagctcctgcacaataccgataatcgtgtttaaaacaatcactggtaaaaaagtcagatcgttccaggcaccaacaaacaccaatagcacagccaaaatagcaaaaatcaagttaaaataagtaaagacattttctcgaattatttgagtagctgttttggactggtcatcaatggcttgattaacctgtccattttgaattctttgatcaacttcagcttgagttaatcccgttatttgtttatctgtcataattttctgtcctatactgaaaatactttcatccattatagcgaaaaataaaaaagccacgcaactctgcgagactttttaacaattatttattttttctacgataagttaaaaaagtatagtcatacttgttcttttcatcatgatgatgctcttcgcgactaactaattcaaaatcatcatagttaatcgctggcatcactgtatcagttttaaaattagctttgatctctgttttttctaaaagatcaacttgatcaagtaacgccctaaagattgaaactccaccaattgcacagatttcttcagtctgatgttgacgaagatattcatttaattcagctaatgtggacacaatcttcacttgctcattacccgcatatttttgctttaattcttgacgatgagttaaaacaatatgttttctctctggtaacaagtgaggcaaactcgcaaaggtttttcgccccatgatgatcggatgacctatggtcttttccttaaaatgcttcaagtcagccggcagatgccaaggcaaatggccatcgatgccaataccatgctgctgatcttcagcccaaacaaaacttaacattgagacctcctaaactgcaaccggtgccttgatcgtgccatggtgctgataattcagcactttgatatctttcatttcaaagtcttcaatgtgctttttttcaggattaagccacaattcaggtgaatcatatggcgtccgactcagcaattcctttacttggctaaagtggttgcgataaatatgtgcatcccctaaagtatgtacaaattcacccacttttaagccggtttcacgcgcaatcatgttcaagagcagcgaatatgaagcaatattaaatggcacgcctaaaaacatatcaccacttctttgataaagctgcacgctaattttgccatcgactacataaaattgaaacatcacatggcatggtggcaaagcactagttggtatgtcttctggattccaagctgtcacaatcatgcgacgtgaatctggtgtttctttaatttgcttaattacattagcgatttgatctataaagccaccacttcttttttcccagtgacgccactgtgctccataaacatcacccaaattgccatatttttgtgcaaatgcagggtcatctaatattcgttgatcaaattttttcatttctgcttgataaacttgattaaattctggatcactttgactacgcaagccaaaatctgtcatatcagccccctgatattcagcactttcaatccaatttttaaaggcccattcatcccaaatatgattgttatgctctaacaaaaagcgaatattagtatcgccccgtaagaaccacaataattcacttttaattaaaccaaacggcactttcttagtcgttaaaagtggaaagccctgtgtcaaatcaaaacgcatttgggcaccaaaatatgatctagttccagtaccagttcgatcatccttgtcatgtccttcagtcataattttttctaacaaatccaaatatggttgttcaagaattgccattatcttcacctttcaaaaaacatttcttctaacataccatagatcttgtatgttggataatgaaaaaccatagatttagtatttcatacaaaaaataaaaaggtgaataatcaccttaattatttttcttaaattcacttttatgtctgactaagtagacaattgttgccacaatcaagactagtgccccagcgataactgaaattcttgtatcaggattgataaacataaaaatcacaatcagtattaacattgcaaaggcaaaataattcgagaatggatacaaaggcaacttgaatggatgatcttgcattgcacctttgttatgtcgtctaaatcttaattcagccagcaaaatcacaaaccacgggatcatccctggtaaaacagaggaactaaagacaatcacgaataagtcactggctgaatgattgaattgcgaagcaattacattcaaaacaaaaccaataaaaataccaccagaaatgcccataatggcccgatcgggtacaattcgcttagaaatatgcttaaaaataccaggagcttcatgatcatgtgacagtttaaacagcattctacttgaagaataaattcctgaattagctccagaaagagccgctgttaaaacaacgaagttaattattgaagcagccgcagtaatccctactttagcgaaagtcgttacaaatggtgaacctaggctgtctaatttatcccaaggataaatcgttacaatgacaaaaattgctccgacatagaaaattagaattctaaacaaaactgacttaacacttttaacgattgcctcttgtggattggctacttctccagcagaaatacctaataactcgattccttcatatgaaccaacaatgattgacattgaaaagaaaaatccttttattccaccagtaaagaaaccaccgtgagaccataaattgctaaagccagttggatgtcccccattaccaacgccaaagaaaataacaataaagcctaaaataatcattagaataattgttactactttgatcatggcaaaccaaaattctaatgaagcataggctttagcactagctaagttggccaaaagcagaaaggcaataatgatgatccccgaccacaatgctgaaatatttggccaccagtacttcaaatattcagttgccgcgactacttcggacattcctactacaatatattcaaagacattggcccacatcgctaaatagccggctaagggatgcacatattctgttgcataatcagcaaatgaacctgtaccaggattgatatagagcatctctcctagtgctcgcatcacaatgtataaaattaagccaacaaacatgtaggctaataatactgacggaccggtccacttaatagtagatgtagaccccataaacaaaccaacaccaatagcaccgccaagtgaaatcatctccatttggcctgctgtcatcgtccgtttgagctgaggagctttagattttttattcaattttcacaactccaataattaatctatcctaattaataacccgcaattaatttactggttaaatcaccattttgtcaaggttcaaattcctgaattgtcaaattaagtgcaacagttaggttatgaagagatatattgcttgaagagttcctctgctgtgtgatattggaggattcggcgatatttgtggttaatggcatcagttgcctgttgaacataagcttttgacttgtctttcatgctcttgcccttagggaagaattgacgcaaaagaccattgcagttctcattggtgcccctttcccatggagaatatgggtgagcaaagtaaatctggcagcccttgatcttggtcatatccgcaaactcagagccattgtcaaacgtgattgatttaaaccaggcaggatgtctgtcaatctccttttgaagcagcctttggcatgtgcttgcccgatagtcaggaatcttgataactacttcaaagcgtgtggttctttcagtcaaagtcattaaagcaggctgattcttgcgtctgacgcctttaaccagatctccttcccagtgcagcggagcttttctgtcttcaatctctttaggacgctgttcaatggaattgccaagatgcttcttgtgcaaagcgtgaccgccatggctgtgatgacgcttgttcctgcgtcttttgagcttcataggcagatcaatattgcttatgtccagcaagccctgatcaatatagcgatagacggttggtgtgctgggacaagggtagcctggcatagtccttttgaattcaccaacgaactcatcgatgctggtggcatcaaatttagctttaaagcgtctggagagcattctcaaaaagacagcataatgcttcaatggattgcgctgatagcagtttttgcgacgcttctcataataaatctgtgcagtatcagcgtaatagtgctcatacaataaatagctgctgtctctttgcaggacgcttccgcgtttgatttcgcgactgattgtcgacttatggcagccaacttcttgagcgataacagtacgggaagttatgccggaatccagcattgcttgaatttgtccacgttgtacgctggttaattgatgatagtgcttagaaatgctagaatttgaattggtcataaagatcttcctttcttgatttttcgtcacttcaagtttaggtcttcatggcctttttgtttaacacttagtgttgcacttcaattttaaatccgggcaaggttcaaattaaaaatattaatatttgggagtcttttctctaattgatcttttattcctttattaaatgaatttcacgatcaaacatttgctgcatctttttattaaaattatgggcaataaagacaattgttgccttgctttttaatagcttttgcaaaatattcatagtcgcagtctgatcaattgcactagttccttcatcaatcaaaataatgtcactgtcatgaatcttagctcttgctaagacgattttttgacgttgtcctccggaatatccaagtcaattttttcatcgacacctgctttaaactttttaatatcggccgcaaaattaacttcatcaagcacttgagctacttgattattaagttgcttgttgaacattgtaatgttttctttaattgtacccggaaataggttcggctcttgtggaatatagcctattcttgacatattaggcttaattgtcaaaccttgactattttgaaattcaattttgcctgtgctaggtttaagttcacccaaaatcaatttaaataaagtagacttacctgcgcctgaatctcctgttaataagattttctcgccaggtttaactgcaatatcaggaaaagtaagcttttcaccattaggatactgcaaagccaaatcttttgttgaaaatgctactggtgtctcttcttggccagctttaactttttcaatcacagtagcatcaccatcaacttgtttcattaaatcctgtgacgatttcataaaacttaatgcctgaattgtttgttgtaagccgatcgaaatattagctgcaaagttttggacagacataattgcaccaaaaatcactaaattcttagtgatcaaaaaagccgtcaaagacaacaggattatttgtcctaccatgttacagatcccattcaaaataattaattgctgttgagcagccgtttgtttaacatgagcctgttctactttacttgaagttttttcacctacctgaaataacttagcaccagcaaaatatcttcttaattcttctaagccagagaaccatttagctaaaacatctagataatgcttattttgctcagaaacattattagttgcttgttccattttcttttgtactaatttaggtacaaagtaagaaacaatatcaatcactacactagtcaaaaagattgaccaattaattgtaagtagagccaccaatgccgcaacaaacattgagccatagaacggcacaattggataccaatcaaaataattttttctaatcatttctaaatcattagtcatccgattttgcacggccggtacttgatgattttgaccatctctaaagtaatgtgtagccaaacgagcgcgcacctttttattatattcttcttcctgcactcgaattacaaattggatataatagatcatcccttgagcagctaaatataaaatccccattaaagccgtcgcaagtaaaatcttcacccaagcacgatctttgatataagtcagccagtacatttgaatgtagcctgcaccaatagcagcgacacctgaaataactgataaaatattaatgtaaataaatcttaaataattagttttaataaagcctttgaaactcaatcagcgtcacctcgattagtcaatttaatttgtcgatcaaacattgaaactaattctgtagaataattgtgcgcaatcataattacagtacttggagtattcaataaattttgtaatacttgcttcgtcccagcactgtcaattgcactagtcccttcatcgatcaatagccaaggtgattgatgaatcaaagctctggataacacaagcttctgcctttgtcctccagataaatttcctttatccaaatcaatttgactattaagtccagcagacatcttattcaaatccttggtaaaacctacttgatctaatacacctgaaatttgattatttaaagcactattaaacatcgtgacattattggcaattgtgtcaggaaacaaggtattatcttgagcaatatagcctaattcatcaagatcaaaatttaatttttgaccattatgatcaaaaaaattgatctcaccttggctgggcgttaatttacctaaaattaatttaaataaagttgacttgccagttccactatcaccagtaagcaagattttttcaccttgcttaactgtaaaatctgggtaagataaatactcaccatttttgaattgtaaggccagatcttttacttctagccagttaatcttcttaacttgatgctgatctggagctatttttactggagcttgaagattagtaatttccttattcaaatccttggtagatttaattaaattccattccgttacaaatgctgaaacaccattcattacagttgaactaaattgaatagtagtaattaccccaccaaaaacaatttgtccttgcaaatataagtaagcacataaaaccatcaagagcatttgtcccacaatattaactacaaaggtgatcatatctgcaatagcaatagttgctccttgatgaatagctgcttttttatattcgtctgcgctttggttaactgattcactaaatatattaaaactggcatatcttcgtaattcatccaggccactcatccactgggctaaagtgtttaagaacttttcatttttcttagtaacctttattgtggccgatgaagtcattttttcaaaagttttaggcaaaaataatgaaattgcagttaaaatcaccgtcattactactaaaagccagttaaatgaaaacaaaattccaattgagaaaagcacagacaacaagtacataaaaccgtttttgattggttttaaataattctgtgttagctgatcaagattggcaaccaattcattttgcactttagcagtttgggcaatttcatttttaaaaaagtagcgactaatttttacacgaatttgatgcaaataagattgtgattgctttccgtataagtaatctgaactagtaatcaaggctaatctaactagatcacagccaatagccaaacaaataaaaataataaagccaaataaattcattttctttagctggttaaaggccggggtcatcaaatattgcgaagcagcatcaacggtcgtaccaatgataaccattagaaaaattaaaatgaatttagctttattgaccttaaaaatccctttaatactcatttgtctcatctccaagcaaattaaaatattaaaaatatcttatttatgtttaatattaccgctatttttttaatattcaatcactttttactaagtggttaaaaaaataacttgaacggcaaaattattactatatctagctaattcattaggaaaaattgggaaaaaaatagactagaaactcattatcaagcttctagcccattagtttaattcaattattaacggtaattcttcaagaaatccatcatcttttgataagctgcatcatgatctgcatcatatgcatcgactacatcgactactttattatccttagtaataatacggtactcacgtaagtctttcttttcattagcaacaactgtaatctcacccttacctggggtagagaacaattctggattaagttcttcgttcaacttatctgataattgttggttaaatgcgattgtattcatttttgtttttatctcttttctaaaaaatccaacacagacattatatcattattagataacgttgatgaatttagttttattttttatcaaggagaactgtacctgcagaaggattatgatcaattgcaccaatgatggagcagtaacaccttcaatatagcacagcaatacttattccaaaaatatcaatttgttattttgccttattacttttacgtatagatttcacttaattaaatgcacaacaagcatggcaattcctaagaagacaaaaattaaggcaacaatcatactagttactgtgccggtaactaaacctaaaatgatcatgccaataattgaataaatattcatttgttatcccttcaattaaacaataacagcagtatttacttttattatgtagcatgaacactttaaaatacaattttaacgtattttaatttgctaactttcgatataacggcaatagctgcccaataccatctaagatgaagttttccatatctgcaacttgatcttgctttctaaaagcaaattttcctaataggaaactggattgagttgcttccttattaaatgaagtctgtttttcagcatctgttaaatactcatttaaggataaatgatcagcaaactccatttcgtttttatcccataagtaccaattattagttgtccgcccttttgcccaatcaggaagatcagttaataatttattgtattgttcaggattatcgccgcgcttttcactcttataatgctgaaacataagataaacctgcagctgcttattatccagcatcacgccgatgcatggacttttatcggctaaagcattcaaacgataagctgcccagtaatgatcgcgtaagttccaaccattggtccaactttcaacatgaactttagcaaatttatcttgtggtaatttttgataaacatttaagtttatttctttccaggtctgccaaatttctttaaaatctgtttttatttgcgctaattcatcttcagaatattgcgatttcaattttttaaaagaaaattcatcccgatcaaaaattgcatacatttcttcagttaattgcgtcattttacaaagcccttaccatatttacgctagtaacaccagttggatctggaatatcatcattggtctcgccttcattataaaaaccacgtttttcataaaatttaatcaatttcggtaaacaagttaaagatatagcttgacgattttgctttctgccctcttgcgctattgcttcaattaattttgtcgctacgccttgtttacggtattcaggcaagaccgctaagctcaagaccatttgatagcgatcatctttttgattaggatgattttcaaaatataattcatcttcaatatagcgtttattaaaagcaggaccaaaaatatgaccaatcacttttccatcttcttgtgcaactaaaaaagtatcaggataattctcaattctaccaatcatatcttgttcagtttgctttttagtcatcttaaatgcgtcagattccagttctactacttcatttaaatcatccattgttacggtgcgaatgatcataataagcatcctccttaggtttatctctaaaagtgaaaaagggttcaaaagtcatctagactcttgaaccctatattattactctctatttaattcttccactttaatttaagacgatcttgctcagtctttttttgaaaatacgtcttcaccttcggtacaacttcttcgccataaattctaatggcattcatcacatcttcatgcggcattgaagcaattggcaaatgaagatagaagcgagttaacccaagttcttccatgactttgatgatcttatttgcaactgtctcgctatcaccaacaaaaattgcaccattttctccgaccgattcaagatattgttcatatgtcatccctgtccattgcggtctttccgtactaatttgatcaactaacaatttggtaggatagaagtaatccttaattgctttgtctttatcatgatttaaccagccccaagagtgtgcagcaattggcatcttcgttaaatcattgccaactttttctgcaactcttctgtacaacttaattagtggtttaaagtgcaaaggatcaccgccaattatcgcataaacgattggcaaacctaactctgcagttcggatagtcgattctatgcttccgcctgtagctacagaaatagggattggctttttagtgcgcggataaattcctttatgatcaactctaggtgtaaactttccttttggcaaatcgagaatttcttctttgttcattttgagtagcatttctagtttttcaataaaaagttcatcgtaattttctaaatcataaccgaatagatcaaatgcctcagtaaatgatccacgtcctgccatgatttcaactcttcctggtgcgattgcatccattgttgcatattgttcataaactctaattggattaattgttggtagatttgtagtagcacttgaaagatggatttgcttagttttcgaagcagcagctgctaaaatgatttccggtgctgagacagcaaaatctttgcgatggtgttcaccgattgcaaatgcatcaatattcaatttgtctgcaagaatgatttcttctaataagtctctgattctttgatcatgactaattgcttttcctgttgtttctaatggtgtagtttcaccaaatgatgagatacctaattcaatattcatttttatcaactcctaaattatttaacttactttttgtaagtaaaataatagcagataatttttgaaaaagcaatatcttgaatatgtgagtaagtgtcaatgtttttgcggtagcctttaaaccattagtctaaccttaatttcttaaatatttatatgacttaaatttctgcttagcttgcttaaataactattgccagctacctgtgcggttaatgcgccatgctggatgcctaaatgaacttcatgacgcttctttaagctgtcacgggccgctgcttttaattcctgttcagtcaatacagttatttctgaatcttcaaactcgctgctaagccaaaattccagctctcgattcttgatgcagcttaagatcctaagcatgccttctgctccagattttgaccatttcttgccttgccccttaacacggtaggtatacttgcggtggttgctctcgcagcagccaatggctttagtcacagtcagttttcgtttcttaaacggcttaatatcgtcccaatgacgatcaatataattccttaggcgccccagataatcatgattgagctcggtattcaattcatcaattagtcggctttctgcagtggttaggatagttttaactttgtcatagctgtatttgtattccaaagcagaaatcagcttgccttgcaggtcaggcgcaaaatatagcctttctttgattttcttatttaggtgaaagacatccaagaaatgctcatgacgcttgcatagccctacaatgtcatcgaagtctgttttggcatatccagcaccgccatcggcgttgctaagaattacagtatcagaaagatcataagtattggccaggtactccttggcttcgttcagcgcatcaagtcggcttaaagaaacaaattccttggcattgattcgctttctgcgtttcttgcttatattgacaatgccttcacagacctgatagcgatgaaattccaaccggcttttagtgcctttgatcaccacgccatcgccttcaagatacaaaactgggacctttttcttagtgcctgcggcatcatatcttgaatctgcttcttggcccgctttaatatttttcccggccatttttaccaaattgcccacctgcatatggctaatattaaagccagacaggcaattgactgctagagcagtattgcgataagtggcaacgctgcttacttctaagatgtttttgactgctaaaatactgtagcgcttgtatttgtcaaagcccattaattcatccaagggataccttgcttgtttgcctgggcagacatatcttcttctgacatacctaacttcgccaaaagccatattgattgagcgctcattcttcttatcaatctgatagccctgtgctttaaccttggtaatcatttcatcatcaactttagctaaagccaaggccatgatttccttaatcaggtttaagaagaaacagattatttttctttcacgcttaatataattatcttcagactttataatatttgcgatttcagttacaattgaattcataaaagaccagcttctaatgtgttttttgttcttaacatcagactactggtctttttgtttgagctcaagtccaaattcaaaggacttgggcttttttaattatttattcaacttaccgtaaaaaattatacacttagaatatgtgatcctttacttagttgcagttcttctaccaacatatttgataaataaagccatgattaaaataactaaacataaaagaaaaatatatgcatgctgtgttccgattctggttaaatcagctgacttagtacctttttgactagaagcaacgattgctgaagtaattgaagttccgacagcaccggcaaattgttgagcagtatttagaatagcgttgccttgagtagtttcactctcatcaatcactgccaaagtatcagtcataacatctcccaatatcattcccattcctgccatgtaaatgatataaactatcaatataaaaatattattcatctgattaggtaatactgcaaaaaacaatgtttcaagcaacatcaaacttacaccaaataaaacaggtttgcgtgcaccataattatctagcaaccgaccaccaattggacccatgattgcaccagcaactcctgctggcaaaacaatcaagcctgctaaaaaagcagtattatgattaaccaattgaatgaaatttggcaataaaaatgcattgcccaaagatattagttgaatgcagaaaaaaccaataatatgacctgtaaaactatgatttttaaataattttagatccaaaattggcattttaattcgattagatctccaaattaacagagctaaagctaataaagcaatcaaaattggaatagcagttgcacccaattgtcctgttcctaagttgctaaagccaaccagcatcccaataaagaagattgcaattatgataaagctaaggcgatcaatcttaacttttttaacagcagatttttgttcaataccccagatgcctaataacaatgaaataataatcaatggaattaaaaaccaaaagacccaacgccaattcaatgcctgtaggacgattccgccaaaggttggcccaagtgctggtgtgattccagtgatcatactgccgacacccatcatagtaccaactttacccttaggcacttgttccaaaataatattaaacattaatggtaaggcgattccagtaccaatgccttgaattactcttccgagcaatagcaccggaaaaattggtgcagtagcatcaactattaagccaagtaaaaacaaaaaattagcggttaaaaatagacttttagttttatatgaactttttaatgcagcagagattggcacgataattgaaactgcaagcaaataaattgaagtcatccattgcacaacattggttgaaacattaaaatcacgcatcaaggttggaaaagcaatattcattgaagtttcaactagaacgccagaaaatgacattaatcccgtggcaattactgctgcaaacacttttgatgatattctttcattatttggttccattttttcctccatttttgacaaattttaaaacttttagtgccgtatttatttcagcttgtgtaaaatgactacgaacttttcgatcatcttgacgcatataatcttttatcttgggaataaatgatttactcttagcagttaaagaaacatccttctgtcttttatcgaccgcattagtaacgcgtttaactaaatctcttttctccattctttgaatcatgattgtcaccgttgaacgctttaaatctagttccttttcaatttcatgttgtgaaacagtttgattttgatgattagaaataaaatctaaagttgtcatttgaacgccggtgatacccaaagtgttagcaaacgtctctcgttcacgatctatttgaacggaagattgcttaataaccttttttatcggttccatataggtcctccttttgttagatgtctaacatattttgcatttatatttgttagatatcaaacatattttttactaatttgagactttagttcaaagtaaatactagtaaatatctatttcatcatttgacgtaaaactcacatctaattctttgagactgtaaaatattttgtgtaaggatgaatgattccttaaatttatttctttaaacattagaaaaaggggttcctttctcgtatgattggtttgaacaaaaaaacacatacagaaagaagaactccttcatgaatgattttaccaaagattttgctcaagctctattcaatccagacaaaataaatgatttattgcgcaaagagctacaacaggctgttaataacttgttagaagctgaattgactgcctttctgggctatgatccctatgccagaaatggctggaatactggcaactctagaaatggtgcttatttccgcaaagttgatacgcaatttggcccaattgaagtgcaagtgcctcgggatcgcaacggtcaatttcatcagcacacgctgcctggctacaagcagcactcggatatcttggaaagcatgattatcaagctttactccaagggcgtgaccaccagggaaatagccgatctaattgaaaagatgtatggcagccattacagtccagctcaggtatcaaatatttccaagcagatgattccaaaggttgaggcttaccacaaacgcaagctaagcgacaagtttttctgcgtctatttggatgcgacataccttcctttgcgccgagaaacatttgagcgtgaagcagtctatattgccattggcatcaagcctaatgggcacaaggaggtcattgactactgcattgcacctagcgagaacattgaagtctggacagatatgcttcaaaacatgaaatcccgaggcttaaagcaagttgagctttttctttctgatggtgttgttggcatgaaaacagccttggccaggacttatcctaaagctcattttcaacgctgtttggttcatgtcatgcgcaatatctgcgctaaagtacgcgtcgacgatcgtgaaaagatcatgaacgaattcaaacaggtgcatcaacagacaaacaaagaagaagccacagctgtcctgcatgacttctataccaaatggggcaaggtttacagccatgttatcagaagcttgaaagacatagaaccagatctgctggtcttttataactatcccaagcagatcagagcttcaatttattcgactaacatgattgaatcatttaacaatgtgatcaagcgcaaagctaagcctaaggcagagtttccaactgaacagtcgcttgatgcttttattggcattcaggcaatgagctacaatgaccgttatttcaatcgaattcataaaggctttggtcaggttcaggacaccttagaatcctactttgattaaataaataattaaaaaatcaatttacgagaaagaactatttacacaaaagatttgacagtttcaattctttactaagaaaaggattttagttacatttgttgctaaaatagatttattatttctactcaaaataaggagttaatcataaatgaataaactaaacttcgaactactgcatatttttgatgttgttagtagatttgctagcttcagtcaagctagcaactatctctacctagaccaatctactgtcagtaaaaaaattagacagctagaagctattgtcaataagaaattatttattaggaatactaatggtattgtcctcactgctgctggacttgcttttaaaaataagtcagataaaatacttcaagatttaaaagaaataattgcgctaaagccaactataaccaccttacgagtcggggtatttgataatataagtgcctatctgatgcccgatatttttgctgaaaattttaatctatttaatgagggaaaattagatgcaatagttatcaatagcgacttctttactcaaattcaaggttctgcaattgagacgcaaattactaatgaatcttttgcaattctctttcgcaaaaataatgctctcattgcaagccaaaatagtatttcgttaaatgatttaaaaaataaaaatcgtaaatcaaaataactattataaaaaatatttattggtaatagttagctatgcataaagcgaatgaataaagattattaattagctattacgtttcttaatttggcgattttgtgttaacttgattgttatccaaataacaacgtatgaaagaataaaaataaacaatgtccaaatattgatagaccaattatttaacaacatcattattgagaataagctaaaagttccaattaacataaaaagtcttcctttccgaattcactatttaaataagtggttaaattcaaaatacaggatgctaaaatttaaaatcctaaaaattaatatctgtaagctaaatatttaagttattgaactgagtttgctatatttaagttaaaagataataaaaggaggaatttcatgaaagttacttttaaaggaaaagaagttgaattaattggcacaccacctaaggttggcgatgaaatgcctaactttacagttttagacaaaaataagcaagaagttactaaagataatttgttaggtaaaaatactttaatcagcgttgtgccagacatcaacacttccgtttgcagtattcaaactaagacttttaacaaaacaatggatcagtttcctgacgttaactttttaactatttcaactaataccatcaaagaccaacaaaattggtgtgcggctgaaggtgttaaaaatatgcaattaatgtctgatgaaaaattatcttttggtaaagctactggcttactaataccagaatctggaatactagcacgcagtgtgtggattcttgagcctaacggtaaaatcgtttatcgtgaaattgttgatgaaattactcatgagcccgattataatactgctgtaaatgaattaaaaaagttgctgtaaaatttaaaaaagattgcctcagtacatacacatatgctaaggtaatcttttttttctacccaaagtcaagtattatcaatgatttaagaaaataaatttacttgttttaatgatgcgaataaggttaaagcaaataagagtttaaatttaagaaaaagcgaaagtaccacaaataagcctatgaatacttgtagtttttccataggttgcttatacttaagttgattatttgatttcagctaaagtcttttattttcggtggctatgttgtaatcatataattgatcatgtttgataagagcaaacattgtgcgtatcagtttatggactgatgcaatggcgattttcttatagccttgtctatttgaagatcgttttttcttgtcataataatcagttatatggcaaggctgcgtagcctttaccgtctccatttgagtaataactcgataaagtatttttctggcaatatgattgccatgcttggtaatgccaagagaactgtctttttcaccagattggtaccttcctggatcaatgccaacaaacgcatcaatttgagctgaagtgctaaaccgtcttagatcaccgagctctgctactaatctcactgctgcaattctagcaacccctgggatactcaaatagatggataaagcacgagcgtttactgctttagccagcttttccatgtagttaattacatagtcgcgttcttgctggagtgaaaataaattagaaatgttcctttgaatagctctaacgataatactatctttggaatcataaggataagcttctctagcaaaagcgtataatcttgtggttaagtaccgtgccctttgttgtcctattccagaaatagaattaagcatttgagttacctgtgtctcattcttttctagaacatatccagcatgtgggaaaagactaacaagcgcccaataaattctgccagatggatgagacagtatttcttcaatttgtgggaaagtggattggaggttgcggtgcaattgatttttagtagtaactatactcctagtaagttcttcataatagcgactggcattctgaagttcatgatactctctgggctgtggatcacgcagcttttgcggggcattaaattgaattaaagccaggcgataagcatctaccttatcagttttattatggcgtaaattattgtccattagctttttcgctttaagcggattaagcttcaaatacttaatatgataatcctctaagaaagcttgcaggcttagagaataaacaccagtagcttcgaaaacaactaaaggagttatcaaatattggttcagttgctcataaagtttttgatagccaaaggaatcattagagattctaaaagattcgccttgtttgatccggtcattaaccacacaaactgtggaagatttactgctaacatcaataccgaaaataatttgtgattccataatataacctccgctgtgaagataaacctctttatcaacctattaattctaattttctaaacacggcatctaagtgcccacagacttcgaagagacttaagaataggtggtaaagcagtccgtttcttttacgacatcaagtgtctaaaaagctgaagacttgatttgctttatcttcactttctattttagacaaaataaaaagtgccagatcgtgaatccgtcgattcatgatccaacactaggttagtatgtttctttagttcttatattgttccattctttgattaagttcttccttattaaaattatctaaattaattgcttttccacccattaaccaatcaatcatttcaggatctactttatctttaggcgtatcgtaataatcttgcaaagaccatacaccaccaatgtcatcaattattccataaccttttccagaaagtatctttggacacttaggagctgcttgatcagtagtgatgttcttaatatctacttcgaattcccagctatcgccataatcataagttaataataatttatctctcttttcaaaatacgaaaccttagctttttcataatctatgcctgtagccggatcccaatctttcgcttcagcgatactttctgcattttcaaagcgttcctgcgtttttttattcagcaaatcaaacatatgtccaaaatctgcattaaacatatctagcatagcaacttctaatgttttcactgacgtattgccactaataataaatctacgccaagtagatggtttaaaagactttagttttactctaatttcataggtagctcgattgcgagtttgattttcaaaaattgtcttttttcgtgttttctgctttttatcatgactctcaagatcttttcgcaagccttctaaaattctagacaaatcctgagaagacagatctaaatcttcaagttccaaaatctttttaggatttgcttcaattgccgctatcatatcgtttatcaaatcctcatccaggccttgatcggagtatgaattaatttcttcaactacccagtcaatattcatccctatttctttactatcagttttacgaataagacctactctactcaaaaatacatagaaatttttcaaagtatttgtaatctgctctatttctagcggatgtagtttattgttagatatcataatccataaataagaaatcgcttctcctaaatcattagtaactaaatggatcttattacgtaataaataatgatttagataatccggcagcatttgatcaggttggatatatcctattcctgctggtacatatttagcatattgatcaatgagtttttgattattttctttaattttagcaacaatcttttcattgccttttactggtttattttcatatttttcaaaattagagaaatcttcaaattttggcactaagtcaacatacttatatcttcgatttggtttttgcggcttaatagggaaatacgtactaacctcatcaatcatcttagaaataaaattttgtccaatctgactatccaaggcaaaaatagtcgctgacattacagttagcttatctacgatattcttttcatcttttacaacatcaatcaaatttaaatattcgctttgattatcctctataagtttacgaattttttctagcattaaactagcttggcttttagtatcgtaaaaagacatttgcttggactttaccgctgaaactaatttttgttgctgtttaaacaaaataaagtcatagcttttaatcgcattagcaaaaacatcattaaacagtttggtatcaagtttagttaataaaattggaaaactagtgtctttttcaactaataaatagtacttttgcttttgaatatttattacatctgcatcccaaacagtaaaaggctcattcttaataatatcaatcttattttctttaatttctggtgctaagttaataccgtatcgtactggaagcatgtggttctccttattaaaataatttcattttaattttatcatgtctattcacaactattcatctcagaagcaaaaaaatgaaggcaatcactgccttcatctaaaatacacaaattttagtcttcttctaaaaccggtactgtctttttatttctaacatgatatacaactaaaccaattgctaaacctaccagtgctggcactaaccatgataagcccatgctggcaagtggcaaatgatttctaagtgaagccactgctaaaccaaatgaactttgactaaccacacttgggaaagcaactaccatatcgcctaaagctggtacaacagtaaataggattacgaaaaagtaaactacacctgccttattaaacaatggtgaacaaactgatagcaagatcaaaaccatggataaaggatataagaacattaacattggtgttgaccatgaaatgatttgatccaaaccaaagttagcggctaagaatgatgccaagcaactaagtgctaaccaaacgtggtaacttaccttaggaaaatgcttatgaaagtcttgcgcaaaagcagcaaccaaaccaactgcagtagtcaaacaggtaactgtcaataagaatgcaagtaaagcttgaccaaagacaccgccataaacgttaacgatttggttaaaggctaccccaccgttatcagaaactgcaaagcgtccgagtgacattgcacccattaagatcaataacaagtagataaaaccgatttctaaaacggccaagacacctgatttagcaacaacttttgaaacacttttagcatctttttgtcccatgccgcgaacagctgtaacaaccgtgaccccaaaggctaagcctgctaaggcatccattgtgttataaccttctaagaagccatttactaatgctccatgcttataagctgcagttactgctgcagtttgtggattacccaacggacgagcaaaagctacaagaaacactaggaataataatgctaagaataatgggtttaataccttaccaacgttagacaagatattattttgatgataagaaaaagcaaaagcagctaaaaagaataaagctgaaaaaacaagtaaagcggaactttgcatattcttcggcataaatggtgcaataccaactgtgaaagaaacggttgcagttcttggggtaccaaacaatggtccgattgtggcatggattaaaaccataaatactactgcaaatccggcacccagcggcttaccgatgtcgtatactccgtctgcatgagtaattgctactgctaatacagagaataatggtaataaaacccctgtgatcaaaaagccaactgcagctgttccccaatttgctccagctagttgtcctaaatgtaatggaaagattaggttaccagccccaaaaaataatccaaacagcaaggaagcaacaacgagataatttttccatgtaagttttttcgatgtatgatctgtcattttctctcctccaaaacatccctgataaacaaaaaaggccctcagctgcaaattgtaactgagggacgctttgagcgtggtaccaccctttatttatatcactattgctagcaatacctttcacgtacagtcaactacttgacgatacgtaggcactataatgggtgctcccactacttcttactttaagttaagaaatagaactcgaaagtgattttcatttaaacttaggatttatctcctcacacctaacgagactcgctgtaaattaagtctaaattactcttctttctctttgttttcagatttattaaatttgttaataactattttaatcaaaatataatcgttgtcaacaacttttttatttatttttcaaattttctattccccggatttaaaattgaagtgcaacactaagtgttaaacaaaaaggccatgaagacctaaacttgaagtgacgaaaaatcaagaaaggaagatcttcatgaccaattcaaattctagcatttctaagcactatcatcaattaaccagcgtacaacgtggacaaattcaagcaatgctggattccggcataacttcccgtactgttatcgctcaagaagttggctgccataagtcgacaatcagtcgcgaaatcaaacgcggaagcgtcctgcaaagagacagcagctatttattgtatgagcactattacgctgatactgcacagatttattatgagaagcgtcgcaaaaactgctatcagcgcaatccattgaagcattatgctgtctttttgagaatgctctccagacgctttaaagctaaatttgatgccaccagcatcgatgagttcgttggtgaattcaaaaggactatgccaggctacccttgtcccagcacaccaaccgtctatcgctatattgatcagggcttgctggacataagcaatattgatctgcctatgaagctcaaaagacgcaggaacaagcgtcatcacagccatggcggtcacgctttgcacaagaagcatcttggcaattccattgaacagcgtcctaaggaggttgaagacagaaaagctccgctgcactgggaaggagatctggttaaaggcgtcagacgcaagaatcagcctgctttaatgactttgactgaaagaaccacacgctttgaagtagttatcaagattcctgactatcgggcaagcacatgccaaaggctgcttcaaaaggagattgacagacatcctgcctggtttaaatcaatcacgtttgacaatggctctgagtttgcggatatgaccaagatcaagggctgccagatttactttgctcacccatattctccatgggaaaggggcaccaatgagaactgcaatggtcttttgcgtcaattcttccctaagggcaagagcatgaaagacaagtcaaaagcttatgttcaacaggcaactgatgccattaaccacaaatatcgccgaatcctccaatatcacacagcagaggaactcttcaagcaatatatctcttcataacctaactgttgcacttaatttgacaattcaggaaattttctattcaaattgagtcggccgattgtaaaattaaattgaacacttgatagaaaataaaaagtccatttggacctgtttgatagaatgttaataaccacaaaaacatctatggaggtcaaaatggactcactacattctatcatggacaagcgtaaaaaaggaacacatctatcgcttgaagagcgggttattattcaaactcgtttgaaagatcattgttctttgcgttccatcgctcgagaaattggctgttcccctagtacaattcactatgagattaagcgaggaaccgttaagctgtatcacggcaatatcaaacgttataaagcccagcaaggccaaagcgtttatcaaaaccatcgtcagcactgtggtcgaaaatctgactttctcaaaaagcacaaatttattgattacgttcaacggcacttctttgaagatggctggtcactcgatgtctgcagtaatcgctgcactgctgtgggtgaatttgccagcaacgatattgtctgcaccaggacgctttataattatgtcgatcaaggcttgttaaacatccataactatgatttgccagagaaactcaagcgcaataccaaaattcatcgcattcgtaaaaataagaagaagctaggccgcagtattgaacaacgaccacaggaagttaataagcgtgatgtgtttgggcattgggaatgtgatcttgttttaggccataagaccaaggacgacgaagtgctgctaactttgtctgaacgcatgagccgtgagttcctaattattaaaatcccagataaaacagctgccagtgtaatgaatgcctttaaaagtctgcgcaagcaatacagcgagcattggaacgatatctttaaaactattacgactgataatggttctgaatttgcggatctatctcagctggaagatatttccaaatcactagtttattatgctcatccatatacttcttgtgataaaggcactgtagagaggcataatggccttattcgcagattcattcctaaaggtgactatattcataactactctctccaacaaatcattgacattgaaacttggtgcaattcattgccaagaaagatcttggcttatcatacaccagatgaaatctttgaaagagaattagatcgcatctatcaaacagcctaaacaaaagtgttcaagttattattgcaatttacgattcaaattgagtctgccaattaggatcattatttgccgcaaaacacatggtaatttgttcctcagtatttcgcccaagtgaaagcttcggtaaattatctaatgcaaaataatcacaggcatcagtttcatcgttcggcttaaattcaccactaatttctttgcataagtaaaataccttcgtaatgttggtggccaaaattggtttattatgatgattacgatcttgaactgcaataattttgacgggtctaactactctacctgcttcttcatatgcctctttaacacaattttgtgctgtagtttggtcataatcattccagccgcctggcaatgaccattcctgagtcattttttcacggacaagcaaaattttattatccttaaaaattgctgctcgcgtatcaatcttaggtgtttgatagccctcatcacccaaaaagagtgttttaatttgttctttaggtagtcctgtcctagctgccatcatttcgcctgcaattttacggattttttcatagcgctcacgatcaaatacatcatgaccataatgcaatcctgcttgagctaaactttgtaaatctgtcgcccacttgataaattgatcatctgaattcatttttattgcctttaatataaaattctaagaaaaataacaaattccaaattaataggtaaattgaaatacctattttagattttatcacaacccataagtaacttactcctagtgcaaaaattagtagcaatgttaacagattacgaatactaaatcgacattcactcttgttatatacttgatttacgcgtggtgctagttaaatcgttttagttaataaaaaagtccaatcttgttagactcgacttgtaaatagtaataatagaaaagagtctgatctgattgaactgccttaagcttaagcgttttagccaccatttacaagttagttttaaagatttagtgataatttgtcggcactggtatcgtttgtatgcaccggctgagtttactcatcggcgaaatgttgatcaaattaaaactacggacagtctgattttggctttacttatctggcaagctaagacaggaattgaatcacaaagaagattctgtgaatgtttcaattgtttatcacactcacgttttaatcggcgttcacgtcagctattgcaattgatttatcagatacggcaagaaatgaataaaaaggttgacctgaatggacatttcttgatcattgacagctttccggtacctgtttgccaaccaattcgaaactatcgtgctaaaatttttcgcggttatgccaacattggttataaggccaccaagaaaatttacttctatggtttcaaagttcatgccattgttagcgatgacggttacattcttgattatgtcgtaacaaaggcatcagttcatgatgccagggagacagttgaactgatagaaaatacccatccatctaattactatcttcttggcgacgaaggctatttaggcaaagaactgcatcaacagctaaaacaaatgggttacgaactttggacaccatatcgtaaaaatatgacaggagctaaaaagcacaatgatcatcaattgatggctattcgcagaacaattgaaagcgacttttcgcttctgacctattacaatgccgagaacaatcgagcacgtagtctgataggctttcaaagccggttggaaattgcaattttagcttataatttggcttattgtctagaaagatttaactagcaccacgcgtacttgatttatagctaatgagaaataatataaggccattgaaaaaataatcaggaaaaacaaaaaagttttatttatgtcatgcacttgtaaatacagtattgctactgttgacaaaaatattgctactacaattgcaatatgactatacattaaaacaaagcctttacttatctgatgatggtcaattaatttatctgataaaactacatagcttgcaaacatcaatactaaagataaaaacaaaaaagcagcataaactaaaggtgtcttactattgaaataacttgtcaaattaacgatagcctcaccaaaggcaataattacgattaaacttactctctctaccaaatgagggaaatttactcgttcagttttaaacatcccttttaaaaacaatggcaaaataaaaccaacaatataaccacttatacaaaaataaattccaacagggtagccgatgattaatcctacaataattaagataaattctattcctaaaatgattaaaaaggcttgtttatcattattatctgcttttacaaatagatactgacaaaataaaattaagatcataacagccattgcaatattaaaatagtgaaaagtaacttgccattcagtattaatattgttagccagataaactgctacaaacatatttaaacctaaaccgccaatatctaaaaattgatttttgctatatcggttaaaatagataacttgataaagccaaatttgcattactacaattacaaccaataaaaattgaagaaaagtaactaaaggtatactgccattaacaggatgatgaatcattgcagtaattcgagaaattgcgtatacaaaaactaaatcatagaataattcaaacattcccacaggcttagcgattatttttttcatactattccctcctcgtattatataaattaaatcagtgataatgattattcttttagtttgtttattcgatcatcagatgctagtctctaattgtcattgaccttggtcaattggtataggttgtttccttctgtagctttgactacttttttagtctgccgcccaagcagttttactaatgacttactcacatgctgtatcgattctggctattactgattcagagcagattcagtcgcagctttttagcttgaacctatgaatacttatattttgcgagattgtcttagaatctgtaattagggactaacatgtgatgatcgatctatgaccaaatatttgctagaaaggaggccattctcaatgaaactttttatcggaattgacgttagttcaaaagatcttcaagtcgctattactgactcagaaaattatcaaaaacctttacttaaccaatctttttctaatgacctgattggtgctaatgaggtcaaaaagataattcttcaacttgctaaacagaacagctatgacaaagtaattatcggcatggaagccacttcaatctatagctttcaccctgcttatttctttgccaatgacgaagatttacaaaaaattaatcttgaaactgatgtcattaatcctaaaaacactaaacgatttcatgacgtttacgaagaaaataagaatgatcctactgatgcctattacatcgctgaatacttacgctttggtaaataccatgtcactattgctcggcaagaggaatacttagctttacagcgtttaactagagctagatatgaaatcacatcttcgctcactagagctaagcagcacttcattgaaactctttattatcgtgtaaacaaactagttaccgttgacaaagacaatattaaaacttctatctttggcgcaacgatgctgtcaattgttactgatagtaaaaccatcgatgaaatcgctgaaatgccaatcgaggatctaattgactaccttcaaaccaaaggacgtggccgcttctctgatccagagactttagctaaagcgatcagaaaagccgttagaggatcatatcgcttaggtaaagtcatgaaagactcgattgatgccgtattatctgtttactatgccgaaattaaaactaatcagaaattgattaagaacttagataaagcaattacagatatcgtccaaacgcttcctgaagagagaatactacaatctattccaggaattgggtcagtttattccgctggtattatcgctgaaatcggcagtattgatcgctttgacactgaagcacagctagctaaatacgctggtctagcttggcgtcaaaagcaatctagtaattttgatagcgaacacaaaccgatgactaaaaacggaaatcattatctaagatattatttggttgaagctgccaacctgattagacaaagagatcccgtttttcggaagtactatcaaaagaaatacgatgaagctttctattctccgcataaacgcgcttgcgttctttgtgcaagaaaattaaccaggaccattttcactctgctcaaaaatggtcaaatctatcaaacaccgaggtgattaattggtctaaaacatttttggaggagtaaataatagttgttaaaaaatcccttgaaatagggcttagtttcatgcacgcaaattttggttttaaaacaaactaattaaaaataaaatttaacttttacattgacttattaccacatgactaatatttgattgctgtttatcatactttatatttgtccaaaaagcaaaatatgatattaatttataagaatcgaaactgtcaaatcttttgtgtaaatagttctttctcgtaaattgattttttaattatttatttaatcaaagtaggattctaaggtgtcctgaacctgaccaaagcctttatgaattcgattgaaataacggtcattgtagctcattgcctgaataccaataaaagcatcaagcgactgttcagttggaaactctgccttaggcttagctttgcgcttgatcacattgttaaatgattcaatcatgttagtcgaataaattgaagctctgatctgcttgggatagttataaaagaccagcagatctggttctatgtctttcaagcttctgataacatggctgtaaaccttgccccatttggtatagaagtcatgcaggacagctgtggcttcttctttgtttgtctgttgatgcacctgtttgaattcgttcatgatcttttcacgatcgtcgacgcgtactttagcgcagatattgcgcatgacatgaaccaaacagcgttgaaaatgagctttaggataagtcctggccaaggctgttttcatgccaacaacaccatcagaaagaaagagttcaacttgcttcaagcctctggacttcatgttttgaagcatctctgtccagacttcaatgttctcactaggagcaatgcagtagtcaatgacttccttatgtccattaggtttaatgccaatggcaatatagactgcttcacgctcaaacgtttctcggcgcaaaggaaggtatgtcgcatccaaatagacgcagaaaaacttgtcgcttagcttgcgtttgtggtaagcctcaacctttggaatcatctgcttggaaatatttgatacctgagctggactgtaatggctgccatacatcttttcaattagatcggctatttccctggtggtcacgcccttggagtaaagcttgataatcatgctttccaagatatccgagtgctgcttgtagtcaggcagcgtgtgctgatgaaattgaccgttgcgatcccgaggcacttgcacttcaattgggccaaattgcgtatcaactttgcggaaataagcaccatttctagagttgccagtattccagccatttctggcatagggatcatagcctagaaaggcagtcaattcagcttctagcaagttattaacagcctgttgtagctctttgcgcaataaatcatttattttgtctggattgaatagagcttgagcaaaatctttggtaaaatcattcatgaaggagttcttctttctgtatgtgttttttttgttcaaaccaatcatacgagaaaggaactcctttttctaatgtttaaagaaataaatttaaggaatcattcatccttacacaaactattttacagtctctaagaatcagtttttagcttgattgtgaaaaattatgctaaagtaattattgattaataaattaatttaattggaggaatagccatgccacgaaatcccagaagacacaatcttaatcaattctcagaccaagaaaaagataaattaaaaaatgtcaaaaaagaattagctgaggcccaaaagaaagagcctgaaagtctacaagcctttaacgatggagtgatggccattattattacaattattgttttagaaattcaacctgctctgcatgaaattcattatcagcaattcattagcaatattgctgtctttttaatcactttttttattgtggcagatttctggtatgatctacatttatctttttcatactatattttcaagccttcaaaagcgattgctattctagacttcttttttttagctgatttatcacttctgccagtcatgactaaatggattatggctgaaaattcttctttcgctgtagctaacttgggaattgtttttttaattgccaaaatcttagaatatctaattcaatattttggtgctaaaaatactgcgcgctattcccaaatcatgcggattattattagccgctcctttattagaaaaatgacggttactttatttttaaatgtaatattgatcattctgtcattattcaatgcaaaactagcaatgattctttatctaatagttccagttatttcatttctttttccagttaaacgcaacaaaattatgtgatttttatttaaaagagcgccagtaaactttaactaaatctactggcgctcttttgttacttttcttgttccttacaatgactcttgcaaacacattctttactatttaccattttgcagtggcaaatgccatccttatctgcacaaggacaatttttctgacatttcatttcatcgtgacaaaattcatttttcatgtttatcatctctatattattatgcctatgataatcgaactttccaaccaatatatcttataattttacttttcctaataagattattttatagaaatatctagttaatttgttaatttaatctgctgatcagctaccgatgtaatgaagtaaggatcatgctcaattagtaacatcgttggcttcacactcttaagaagcttaattaattgatcttgattgaatacatctaaataatttgctggctcatcccataaatataaattagcaggttctgtcaatgacttagccaaagctactcgtttctgttgtcccatactcattttttcaattctagttgtaaaatcagcacgcgcaaatcccattttcttaagattgctcaacaaagcttcataagacaaatgatattttttagcaaagtcttttaatgatccgctatacattacaaattcttgtggtaaataagagattttcaaactttcaattagctcataattacctttggcaattagattttgagagatacccagtaaatgcttaattaatgttgactttccagaaccatttttaccttcaatagcaataatttcatgattattcaaagacaaagtcaagcttttaaatagttctctactattttttagttgcaagctaagatcattaagttgcaaaatctcacgatgataatctgcctgaaaattcatagtcagagtaggaactttttcaatattctttagcattccttctttttccgcaatcctcttatccatgcgattgcgtgcattaatcgacttcttcatcatctttgcagcttgatgtccgatcgctcccttatttaatctggttcgacgattgataatatgctgtgttttcatccctaatttcttacgtgcctctattttagctgcccaattatggaattgtaccttttcttggttcaattttttcacttgccctgtaagctttttatttttttcacgatcaaaatcatctcgcctttttttagttacctcataagtcgaataatttccttgatacaaatgaatcgctgtattttcaatcgctaatatatgatcagttacctgattcaaaaaatctcgatcatgactgactacaatatatccttgatcatgcccatttaaatattctgctacttgtttacgacttgtctcatctagatgattagttggttcatcaattagaggaaaagaatcttgatctgtaaatgataaagctagcaaaattttagtttgctcaccaccactcaaggtattgaaaggctgccataataaatcgggatctaaattcattagagttaactctcgttccagcttccattgttcaaaggcaacctgatcttgtaactcataaaaagtaatgtttttagaattttgaatttttacaggataatatgaaaagctagcattaccttgaatttgaccagttccacaatacttacctcgcagtaagtttaaaaaagtagttttacctcttccgtttcgaccaatcaaacctagtttccaatcagtatcaaggtctaggttaagatttttaaaaatatatctattgctgtcttcatattcaaaagataacctactaatcttaagattactcatccaaccacctcgcacaaaaagagcccatacttctagcaagcatagactctctccttacgaaaatgaattgtaataatcgaaggcctgggctttaatcctgctaaaagtacatagtctctccataatataaattactatttggactatgatgctaattacaagattaaaagcgcaacctaaacccttctttcattgaataatattatgctgtaataatagcacctgttttattcttttacaatagatatattaagtaactctatttattccataaaaacttaattaatgcttgatcaacttgagcattttcatgcagttttgaatgttgtgcatttttgccattaatcttttcaactttataagtactgtcaccatcaccaataatatttaggacttgaacatgctttttcatataaagctctcttacacctgtcatttgctgataagttgagtttatcttattaggctttccattaatattcaatcccattcataaattgcatctatataatttctaataaattgctcatactgcaccttaagttacagtatgagcaaagttaatcctttttttaatgtatttaattttacgaccgatgaatacatattattcactaattagtcctagacgctttcttactcttaatacatgacaaatcaatccaagaattaatcctgcaatcccaaaggtcagccacccaaagcctaaattgaaaaatgggaagtactgttgggcaaaaccaagcagtgtctgtaataatcgactttcatgtaacccagctggtaacgcatttaacatgtcaaagaatgctggaattaaggtaagctcagttgtaatccggtaaacgagccggtcattcttaaacagtggtgaaagtagccctaaaataattaaggtaattgctaacggatagaggaacatcagaattggcgttgaccatgcaataatctggttgagtcctaaattagcaaatagaaatgataatccacaattgattcgtaaaaatgttcgatacgaaattttaggaaaacggcgatggaaatcttgcgagaaggcaattactaatcccattgctgaagtcatacaagtgatagttgctaaagttgctaaaattgcatctccagcagttcctaagtaatggtgtgaaatctgagcaagagtaattccaccatttgctgctaatttaaattgatgcaaactagtcgcgcctagccaaattaaagctaaatagataattgcaactcccgcaattccgagaaaaccactcttagccgttgcaagtgaaatttgccgtgtcttcttaatacctaattctctaattgcagtaataatagtaattccaaaggctaatgctgccaagccatccatagtattgtaaccttgcaaaaagccattggaaaaagcatgccttgcatatgaagcagttatagcagcagtatttctagaacccaatggattaatgaatgctaataagaagataaggaataataataacaagaacaagggatttaaaactttaccgattaaagtagtgatctttccctcatgatttgaaaaaagataaactaaactaaagaaaattgctgagtagattaataatcccaaagtattagttgacttagataaataaggggcaattccaatttcataaggaacagtggctgtccggggagttgcaaatagtggtcccaaagtagcgtgaacaagaattaaaaagataagtgcatagtaacgaccattcggcaatgcaagatcatagatcccattcgacttggtaatactaattgccaacagcgccattaatggcagtaaaacaccagaaagcagaaagccactactcgctattagccaattactacctgctaattgacctaaatgaactggaaaaataagatttcccgctccaaacaacattccgaaaataagtgatgcgataatcattgaccgcctaatactcgcttttttggttttcattttaatattcctttcgataaaaattatattaatactaggtacaaaaaaacgtccttataagcataaagcttataaggacgctatcacgcgtgttaccaccttattttagaataatattactattattcccttaccccatacatagcaaaactagatacgttgacgctataacgggcgcgccctcctaaagttacaattactctcacttcaagcactcataggctactttcactttacttttctatccccactcacactaatttgggttcgctgactagttaaggtaaagctaatttcctattcttagtggttattcataccatttatttagtaagtatattacataataaatttaataaagtcaatattattctaaactattttcccggatttaaaattgaagtgcaacactaagtgttaaacaaaaaggccatgaagacctaaacttgaagtgacgaaaaatcaagaaaggaagatctttatgaccaattcaaattctagcatttctaagcactatcatcaattaaccagcgtacaacgtggacaaattcaagcaatgctggattccggcataacttcccgtactgttatcgctcaagaagtcggctgccataagtcgacaatcagtcgcgaaatcaaacgcggaagtgtcctgcaaagagacagcagctatttattgtatgagcactattacgctgatactgcacagatttattatgagaagcgtcgcaaaaactgctatcagcgcaatccattgaagcattatgctgtctttttgagaatgctctccagacgctttaaagctaaatttgatgccaccagcatcgatgagttcgttggtgaattcaaaaggactatgccaggctacccttgtcccagcacaccaaccgtctatcgctatattgatcagggcttgctggacataagcaatattgatctgcctatgaagctcaaaagacgcaggaacaagcgtcatcacagccatggcggtcacgctttgcacaagaagcatcttggcaattccattgaacagcgtcctaaagagattgaagacagaaaagctccgctgcactgggaaggagatctggttaaaggcgtcagacgcaagaatcagcctgctttaatgactttgactgaaagaaccacacgctttgaagtagttatcaagattcctgactatcgggcaagcacatgccaaaggctgcttcaaaaggagattgacagacatcctgcctggtttaaatcaatcacgtttgacaatggctctgagtttgcggatatgaccaagatcaagggctgccagatttactttgctcacccatattctccatgggaaaggggcaccaatgagaactgcaatggtcttttgcgtcaattcttccctaagggcaagagcatgaaagacaagtcaaaagcttatgttcaacaggcaactgatgccattaaccacaaatatcgccgaatcctccaatatcacacagcagaggaactcttcaagcaatatatctcttcataacctaactgttgcacttaatttgacaattcaggttctaaactatttttaattttatacttttcgttttgacatcaattggtttcgaatgtatctgcgaaatgcttcatcaccaagtttttgacgcttttcatataattctttggtaatcttaccagtaacataacacatccgatcacgatccttatcagtgacagccttaaagatatcttgagccacttcctcaggcgattctaaactatctgtgtctggcattaacatttttgtttgattttttagtaactgatcaaatcccggcattgcgaatgtctccatcttaaaaccggttttcacaacccctggaacaatgattttcacctgaatgccaaatggcgctaactcatgataaagcatttcacatactccagtcaccgcccacttatctgctgcataaataccatctagagctaatcccatttctccagcaagggaagtagtagtcaaaattaacccacttttcttttttttgaaatatgggataaatttttgggtgacacggatcattcccagcaggttcgtgtttaaggactgctgcatggcttcttcggtcatgtcctcaaagcgagacttcatcccataaccagcattattgaacaaaacatccacctcatgctttttaagaacttccgagactgtctgagaaatttgttcaggcttcgttacatcaagtggataaataaaaacattttgataggatgttaattcggtctctttttcaggtgaacgcatagtagcaatcaccgttcaccctttttctgcaaataattttgctgttgctttgccaattccggatgacgaaccaacgataaaaattgtactcatattcactacactccttatcttaagatggacgattaaattattcactgacgataattaatgacttgattgcttcacgtttatccatcacttcatatgcctgttgaattttgtcaagactaaaacgcttagtaaagacttttcctggatgaattttaccttttaatacagcatcaagaagaatcgcacgatcataagtagtgacggaagcaattcctccgcgaagaccaatgttcttccagaaaagcgtgtttgatgatggttcggtttgtggaacacctactcgaccaacaattgcgcctggacgagctaacttgccagcttgttcaatagcagatacggccccaacacattcaagaaccttcttaactgcatcatcaccacgtaatttagcaccgattacaccacaaaggccaacagcaccatccccgataactgcgaccgtatcgtcttccttggcttcagcacttgcagccgcatggtaaccagttgccatcacatcagctaaagttaaaagatcgtttaattgctcgtccgtgtaatctgaggggtgacctggaatctttactaatgcccagttagcattagtaaaacgaagatattcaccttggtaaccaccattactgccagcttcttggttaacacagttgccatcgaaaccagctaaacaagctacgcagtgaccacaaccatgagtaaatggtgcaattacaaaatcaccaggcttaatatctttaacgttatcgccaacttcttcaacaattgcaattgcttcgtgtccaactaatgatcctttttcacgattagtaatcccacgataccaccataagtcggacccacatacacaagcacgaacaatctttaaaatcgcatctgttggcttttggattattggcttttcaacctcatgaacttccatcttaccagattccataaatacagctgctttcatctaaattcgctcctctaattatttttacattgtattaactcaaactgtaaaccttaaagtccactacaaggcaagtaaaaatttaactcggcttattaatgccaatactttcgcaggaataaagctcatcatcgttaagtaattttgtaaccaaatcaacgattgattttattgaaacatcgggaccaccaaatggttcgcccttatgagtaatttcataattaactggaccaccagtaaaccagccgggacgaataacggtatagtttaaattagacgcttccacgatgtcagcagcgtcccgatatgattgaagaattgggttgctttccaaattactactaataccaattgaagcaggaatctcattataaattcccatcgaactaataaatatcaatcgtgatatgttattacggtccatcgccgcaataatctgcttagcataggcaactaagtcaccgcttaatgctgcaaacaccgcatcctgtcctaccaacgctttgtctaaatcgtgatcatttaatacatccccactgattacagtttctcgttgaggatcaataacattaattcgattggctgaccgcgcaaataatgttaagtgattgtccgtttcatttaatactgtttgagtggttgtagtccccaatgctcctgttgctccaataattaaaatattcttcataacatttgacctcctttaataagtgctggcgatctgcttagtgatcgcccatttaccgttaatcttcgcaaattccatcttcatttgaagcaacaatgtacttactgggcttccccaaacgctagctttaactttattgtgaccaattaagctagcgtgattcccagcaatctgaatgtctgagatctgctcctcatcagaagaataatacttaagctcaccattttggatttgatcgatccattctagtttgggctgagcatacccagtcatgtggtgtaataccatggttgaatctaaaatctgacccaaggtttcaatgtctttatctacgattgcccgattttcctggcggtaaaggtcaataattacctctttatctgtcatcaaatcgtcctttgctaataactgttccatcaaagccttatcaaaaccagtttttctctttttgctttgattaattgtctatatcataacgatcttcaataactaaaccaattcacatttacaattaataatcataagtaaaacttatcaagctaaattcttatatacacaaaaacgccaaaaattagtgaagaagcttctttttgacgtttatttttacctcatagtctatttcttaaaattgtttctttaatagctcagcaaacttttcaatgtaaaagcctgaattatcttgtttccaatatgtatagtaattttgttgaaggggaatatcaccggcataaagcggaattgtcttaacagtttctttattaatcatcgcttgagttcgtttattaacaataaagtacccctgattggctgctaccattatttgagcctcatcgatagtagtaaccgttaaaaaccggctttttattcctaaagcatcccgataatattgttcctcagccgctttttgtgtttcattaacaattaaaatgcatgataagtcagctaattgcgttgctaaaatacggttattatctggatagttcaatggtaaaactaccataaaatcagtttcagttaagaattcattgtggtattcgtttgataaagcacgccgctgatcggagaaagccagatcaattctatcatgttttaataactcaaataactgttcatgagttccgcttttgattttaacctcgacttctggatacatttgcgaaaaatgggcaacagtatgcaaaaattcgttagtaccaaaattcgataaatagcctaaacgtaattcataattgattggtaatttaccaattttttgtgtctgatcaattaattcattagttgttttaacaacttctttggcgtgttggtagaagaattcaccagctgccgtcagttcaaaacttcttccctttcggtcaaacaatttaacatcaagcatattttcaagctccttgatttgctgggaaatggctgactgggaaatattattttcttcggcggcgcgggtaaaattatgtcgatcaaccaccgcaataaaatacttcatctgttgaaacatttacttatcctctcaatttgatttggaattactaaacaaagcaacgatgctcaatatactttgccccttcacgaattgacaacggtgccaactcttgctgattttactcaataaaatcacgaaccatgatttcgcatatatttttcatttgtctagcacattcagggttagcattgtgagcaaaccgttctttcaattgtctataatcaagcatctattcggctccacagcttttttactactatcttatcagatgtttattctcatcaagcatttcttttttctttaattcataatattcttcttcatctaaaaatgacatcacatggttttcaaagtggtcaaacttgtaggctagataattccaagttcattccgttttgcaagtaggataaagcctgtttaacgagaaccaattactaatattgaaaatatttaattttttgcttgactataaatgaatgatcgtttattatacaaatatgcgatacaaagatgaacacaaaaaagaagctatttatgaagcaacaattctacttctaaataaagaaggtttttcatcaacatcaatgtcgaaaattgctaaacatgccggtgtttcagcttcaacaatttatatttattttaagaataaagatgatatgttgaaaaaattgtatttagatactaagaaaaaaatgagcgccaaaatgtttactgatacaacaaatgatgatgctaagtctagcctagctaaggttattcgtaactatattgattttattttagataatcaggatgcttttctctttttgcaacaattcactaactcgccttatatgactgaattagatgagcgcgaagcaagcacctattttactccaatgtatcaattagttaaaaaaggccaagaggagggaacttttaaagatgtagacgctaatttattatttgcctacattgagccaccaattaccgaattagctaagcgtcatttcaaaggagaaatagattttactgaagaaagaattgatgtattaattaacttagcttggagtgctattaaaaagtagcactttaatttttattattacagtgaacgatcattcgtttattataataaaatcaagtgtttacttaatcgtaaccaaaataagcaacaataaatgaacggagactacaactatgcaaaagaaagtaacttttaaaaacaacgaacacgacatgtctggtatcttattctttccagataattttgatgaaaacaagcaataccctgctttctcaatcgcatctcccgctggtgcagttaaggaacaaattgcaactaattatgactcacggttagcaaagtatggctttattgccctagcatttgatacttcacatcaaggtgaaagcggtggcaaccctcgtcaattagaagctccttatgaacgtgtggaagacataaaatgcgctatcgattatttaacaactttgccatacattgacaataatcgtttaggtcagttaggtatttgtgctggcggtggctactcaatgcatacagctatgaccgaccgaagaattaaagctgttgtagctgtaagtatgagcgatccagcatcatggattcgtgacggttttgacggaaaaacctcagttgaaactcaattagccttacttgaagaagcttctaatcaaagaactcgtgaagctaatggtgctgagccaatttatggaactttcgttccagaagaagtaactgaagggatgcctaatactttagtagaagctcatgaatattatcgtaccccacgtgttcaacatcctcgttcaactaacaaggtatcaatgatgtcaattgataaaatgactgacttctccactttcttgtttgctgatcgctactcaactcaaccaattttgatgattgcgggtagcaacgctgacactttccgtttctcagaagatctgctcaaaaaagcagcttcaactaacaaagaactattcactattgaaggtgctactcacggtgatctatatgataaacccgaatacgttgatcaagcagttgaaaaagctgccgctttcttcaaagaaaatctttaaacatattaatgtgaagcgacttaaaatgaataaacaaatagtctacttttcaaacagtggcaataatgagcgtttagctaaaagaattgctcattattatggggttaatgcaacacctattattccagttaatccgtatcctaataaatatcatgagttaacttcacaggcaaaaatagaacgttttcggcacattaatgttgctattaaaccagttaaacttgaatcaaatatcaatactctaatcttagtatcaccaatttggtatgcagatttgccacgccccgtggtcacttttctgaaacaggttcagagatcttttcaacatgttgtttttgtcagtgacaagttcatgataggttttggtatttgcaagcgaacattaaaaaaatatttatcaaagcaaacaactattgatttaatagcagccaacagtaataacttttcattagttaaacaatactttcaaaaataaaaaaaactcttaaagattgacgtgtagagttctgtcttctttaagaggctttttttgtgtttgcttcacgataaatactttgaataaggctttctagtaaatcattgccaaatatacaactatccaattatttttttacctgaattgtcaaattaagtgcaacagttaggctatgaggaaatatattgcttgaagagttcttctgctgtgtgatattggaggattcggcgatatttgtggttaatggcatcagttgcctgttgaacataagcttttgacttgtctttcatgctcttgcccttagggaagaattgacgcaaaagaccattgcagttctcattggtgcccctttcccatggagaatatgggtgagcaaagtaaatctggcagcccttgatcttggtcatatccgcaaactcagagccattgtcaaacgtgattgatttaaaccaggcaggatgtctgtcaatctccttttgaagcagcctttggcatgtgcttgcccgatagtcaggaatcttgataactacttcaaagcgtgtggttctttcagtcaaagtcattaaagcaggctgattcttgcgtctgacgcctttaaccagatctccttcccagtgcagcggagcttttctgtcttcaatctctttaggacgctgttcaatggaattgccaagatgcttcttgtgcaaagcgtgaccgccatggctgtgatgacgcttgttcctgcgtcttttgagcttcataggcagatcaatattgcttatgtccagcaagccctgatcaatatagcgatagacagttggtgtgctgggacaagggtagcctggcatagtccttttgaattcaccaacgaactcatcgatgctggtggcatcaaatttagctttaaagcgtctggagagcattctcaaaaagacagcataatgcttcaatggattgcgctgatagcagtttttgcgacgcttctcataataaatctgtgcagtatcagcgtaatagtgctcatacaataaatagctgctgtctctttgcaggacacttccgcgtttgatttcgcgactgattgtcgacttatggcagccgacttcttgagcgataacagtacgggaagttatgccggaatccagcattgcttgaatttgtccacgttgtacgctggttaattgatgatagtgcttagaaatgctagaatttgaattggtcataaagatcttcctttcttgatttttcgtcacttcaagtttaggtcttcatggcctttttgtttaacacttagtgttgcacttcaattttaaatccgggaattatttttttagttaaatttgatgtaatatcagacaataaagaaatttttcctactccacgcatcccgtaaataatcgatatttgataacatcttcaaatgattcaactacattttcgactactttgtttctccctaaatatatttggggaactttaccaaagttagtatcaaatagatttttggcttctatagtttttcctccattttaaatttcttcagattttttgattttattttagatctaattacataataaaaagtaagctattacacttgctaaaatgaaatctaaactatttattacattgcttctcctattatgaaatgcttttaatgtctaattttgcttttttccatatcccagcaggtccaagccagcaataaaataatcagtacaataatagcataagcgaaaatcttggcatcttgtttaggcattatattaaatgaaacaaaggttgccggcaaattatataagttcaagaaaattaaaataatcgagctgatccagcctaagaccgaccagcttctcctatttttgaattgccccatcattcttttatcatcagtcataattaataatggaacaatcgaaaatgggacagcaaaagctaagaagacttgtgaattttctaaaagcatgttgagagcaaagtgctgctgagaaattgtgtcgttagctgtcataacaacgcaaatgataactggaattacggataatagccgagtaaataatcgtctcgcccaaagtggcatcttcaagtgaatgaagccttccattacaatctgaccagttaaagtccctgtaatagtagaattttgtcctgaagcaagaagtgctatggcaaagagaactgataaaattccagttttagctactgaaatcaaaattggattacttagcattgcagtattgcttaaagcatcataaagtccaaaaaatgaactatctttaaccgctccacttttaaaaacagctgctcccataattagcaaaagcacgttaacaaagaatgctagaataagttgaatatttgaattccaagtagtaaaacgaactgcatttttgacatcatctggatcatgatgatttatctttcttgtttggcaaattgaagaatgcaaataaaagttatgcggcatcacagtggcaccaataatacctaaactacctgttaacggggaaagcccattaaccacgggatgttgtgcaactagttcgggactcggaaaaacagacaagaagatcttactccaattgggctctgctaacatgacttgataggcaaaaacaaataaaatcaccataatcaaacatgaaatcaaagcctctatttttctgaaaccaacctttgacaataataatagtagaaacacatcaaaaatagtgataaatgttgctataactagtggaattttaaataaaaggtttaaggcaatagctgcaccaataacttccgccacatctgttgccataattgctaattcaattacaatccaaagaataaagctcaatctcttactagttctagcacgaattgcctgcgctaaatccatttgcgtaacaattcctaatttagccgacatatattgcaacagcatggccattaaactggaaattaaaatagtagaaatcagtaaaaagttaaagctctgtccaccattgattgaagcagcccaattgcctgggtccatataacctacagcaactaatgcgccaggtcccgtataagcaaaaagcattctaaagaaattcttagttttaggaaccgcaatcgtactattaatctcagctagcgatttaccattagcatatgaaataaaactatgattttccatcaatggtgctcctatccatggattcctagtgtcattcgagcaatacgcgacatcatatttggattccattgcggataccagaccagtttaatttgacaatcatcgatttccgcaacgctctctgctgccttggtaatttcgttattcagccattcactcaaaggacatcccataatagttagtgtcatcgtaatctggcaaagatgatcatttacctcaatgccataaatcaagcctaagtcaacaatatcaacttgcaattctggatcaattacatcttttaatgcctggtaaacatctttttcttgatcagataaattttctatttctaacattaaccaattgctccttccatttggaagctgatcaatcgattaagctcaacagcgtattccattggcagctgcttggtgaacggttcaacaaatcccataataatcatttcagtggcttttctttctgaaataccgcgactttccaaataatacaattgatcttcagaaattttagaaactgttgcctcatgttccatcgccacatttgagttttcaatcgcattagttgggatggtatctgaagatgattgatcatccataataatcgtgtcacattcaacatgcgccttagaaccgtccgactttttagaaaacttaacacttcctcgataatcagttgagccaccgcctttggcaattgacttagaaacaattgagctagaagtgttaggggcattatgaaacatccctgctccagaatcttgatgaatcccgtggtgtgccactgcaatcgaaagcatggtaccacgtgctccttcaccatttagataaacgctcggatatttcatggtcaccttggcacctaaatttccgtcaacccattccatcgtagcatgcttgccagcaacggctcttttagtttccaaactataaacattatcagaccagttttggatagttgtataacggcaatatgcattgtccaacacatttacttcaaccacagccgcatgaagagagtcagatgaatattgtggtgcagtacatccctcaacataatcaaggtgtgcatcttgatcaacgataatcaaagttctttcgaattgaccagaattttccgcatttaatctaaagtaagcttgaacaggtgcagggacttgaactcccttaggtacataaataaaagtgccacctgaccaaacagcacagtttaaggcagaaaacttatttaaatcaattggaactaatttgccaaaatatttttttaataaatctggatattcctgcaatgcagtatcagtatctgtaaagataatccctaatttatcaaattgctctttcatcttgtgataaaccatctcagattcatactgggcagctgaaccagctaaatattttctttctgcttgtggtacacctaagcgttcaaaagtatccttaatatcctgtggtacatcattccaatcacgatattttttatcagtcattttttgataataaagcatatcatctaagtctaaacccgaaagatcaggaccaaaactaggcattggcattttttcataaatatggaaggcctttaatcgataatctaacatccacttgggctcatgcttttcagccgaaatttgtctaattacatcttctgttaaaccatgtcccgttgaaaattttggttttacattatcatgaaagccgaattgataatcttcatctttaactatttcttctgctttagtcattatcctcatcctcgttttctttaccaagtaatgctcgatctaatccccaccaagccaaggtggcacatttaatccgcgccgggaattccataatacttatcaagacttgagcgtcttctagtttttgcatgtcttgttcactacgttttttgccagctgctaagtctgaaaatatcctagaaaaactaatagcctgttcaatattttttccttttaccaattgggtcatcatactagctgaagccttactaatagtgcatccttccccatcaaaagcaatatctttaatttgatcattctcaaccaaaatagttaagtgaatcttatcaccacaagttggattataaacagtcgtttcattagtataattagcaagttgtccaaaattgcgtggagtttgagcatgatcgagaataactgctttatacaaactttttaatttatctaagctcaccgaaaaactcctttgcttcttgaattgaactaaccaattgatcaatatcattttttgtattatagattgagaaactagcacgtacagttgattctgtcttaaggctttccatcaatggttgtgcgcaatgatgccctgctctaacttctacaccatttaaatcaagtgctgttgctaaatcatgtggatgaatttttcttaaattaaaagaaatcacaccagtacgattactgcagtcttttggaccatacaccactaagtcatctatttttgataattcttttaaagcatatgctgttaaactatcctcatgtttttgaattaaagttaaatctaactttcctaaataatctattgcggcacctacgccgatcacgccagaaatattcggagttcctgcttcaaacttttgaggcacaggtgcccaggtagctccttttctagttacatttgtaatcatttcaccaccaaaacgataaggcggcatttgttctaacagagcttttttgccataaagcacacctactccagttggcgcaaacattttatgtcctgaaaatgcataaaagtcagcatctaaatcagtcacattaaccggaaagtgtccgacggcttgagcgccatctactacaacaatcgcgccatttttatgagctaagcttgttaaagccgcaataggattaattgtccccaaaacattgcttacatgagtaatcgctacaattttagtttttgtagtaattttactttttgcatcttccagatctaaacgaccattagcatcaatttcaataaactttaacttagcgttctttcttaaagcaatctgctgccaaggcaaaaaattgctatgatgttccataattgaaacaacaatttcatccccagcttggatattttgctcaccataagttgccgcaactaagttcaaactatctgtgcaaccactagtaaatacaatttcacttgcatttttggcaccaataaagtcagctactttttgacgggcattttcatatttttgtgtagcccttagccctaaagtatgaacaccgcggtgaacattagcgcgatcaaaattagtaaaatgttcaatctgtttttctacaactaacggcatttgactagttgctgcattatcaagatagatcaatttttcatcattaattttttgattaagaattggaaaatctgctttaattttcttaacgtctagtttgtccatcaattaattttttttccaaaatatcaatcatcttttgccgaacttccttattaggaattgcatcaagaacagcccctaagaacccgcgaattaccaatctttgagcttgatcatatggaataccacgactcattaaataattcatttgaatttgatcaacaggacccacactagccgcatgagcagcaataacatcattttcatcaattaaaagcagtgggttggcatctccatgtgcattatcagacatcattaaaactctattttgttgatcagccttagagccatgtgcaccatgaacaatctgaccaattccattaaaaattagttgagaattttcaagtaaaacaccacgttgatttatcaaaccagttgaatgtggcccgcggttggttactcggttgttaataccgactctttgatcaccagttgtaactgcaattgccttagaatccgcataactgccttcgccaattaattctgaatccaaatcgcctaaggtgttgcagtcattcataaaagcaattgcccattcaacatgtgcatcattttcaattcttgcacggcgattaaagtaaagcgttgtatccttatccatttcatcaagggatgaaaattcaacatgactacctggatgtgcaacgatttccaccattaagtttgcggatttaactgctttatcctcattttgaatttcttccaagaatttcacttgactgttatcctccgtaacaatcaataaatgtgaaatatatggatcttgcgtagggttcaaagtaactgtaattggttcggctaaaactgtatttttaggaatataaagaaataagcctgaatttaaatacgcataatgataagccgttaatttatcttcatcatttttaataacggaagctaatgcggatttaactaaatctggatattgctttattgctgtaaaaagatcgcataagatgattcccttatcgttaagaagatcatgattctctttttttataaaaaagtcaggttggttttgccacttaaaatcttctttagcaatcaacggccaatcttgataggaaaaacgctgcattttgggataagaaagtttatgcatcttttcaaaagaactagtccttaaatcagttaaccaggaaggctcgttgttttcctttgatgagacaagtatgttttctttgctcaacatttgacgttttcccccctaattttcatcaactaacttaatatgtaacccaagttcatcgcgaagacctgcatatccttctttttcaagttttttagctaaatctggtccaccgtctttaacaatacgtccatccatcatgacatgaaccacgtcaggcacaatataatcaagcaaacgctggtagtgtgtaatcattaaagcaccaaagttgtcaccgcgcatggcattaactccccgtgatacaactcttaaggcatcaatatctagacctgagtcgatttcatcaagaatgccaaaacttggtttaatcattaacatctgcaaaatttcgttacgtttcttttcaccgccagaaaagccctcattcagataacgctcggtcatggcttccttcatatctagcaaatccagatttttatctaattcattcaaaaaagtcatcactgaaatcggatcatcttttggtcggcgagcattaattgctacccgcaaaaattcagcattagtcacgccaggaacttctgctggatactgcatagctaaaaataatccttttctagcgcgttcatcaactggcatgttaataatgctttcaccgtttagcaaaatatcgccttgcgttatgtgatagcgaggattccccatgatagtctcagataaagttgattttcctgttccattaggtcccataattgcatgaatttcacctgtcttgagagttaggttcacgcctttaagaatctttttactcgtttttttatctttgtcttcaacttctacatgtaaatccttgatctctaaagttgccatttaaatcctctttttctacatttggtattgctgcttaactatcagatacaacatatagataatataacgcaaaaaaaattttattttcagtcttgacttttaacctaacatgtttgcgtagtcatgaactggcacttgaagtgttaaatcagaaattggaaatgtaacacaagtgttgacatagttgtattcactatcggctgcacgacgtccaggaaatggaataaatacttttccattaactactcttgaacgacatgcaccacaaacgcctgagcgacatgatgaaggggcaataatacctgctctttccattgccaccagcaaactttcatcacttcttgctggaataacttgtatttgatcacgggttttaactgtcatgttgaaagtcttattctttgcttcctcaggataattcttgaaaaagtatggatttactgaaccggacatttcttgtcttacttgccctggacgaagatctaactttttaatttcttgatttacaaaatgaatcatcgcagctggaccactcatataaatagaataattcttatctgctggagcatatttttcaatgatggcctgattgataaagccatgttcatatccttctacttcttcatcacttaatatgttaacgaccttgaccttatcagttttggcagcaattctatctaattcatcacccaacaaaatatggttgtgcgttctacttccatataaaataatcaaatttgcatcaattgtgccatcagcaattgcaccagccattgagtaaaatggtgtaataccgctgccaccagcaataatggtcttcttgtctcttaatggttcatagaataattgaccagcaggacccgaagcagctacttcagtgccaaccttccaattctcccaaatataaggagttacatacccatttttgactaacttaattgtgagcatatattcgccagaaagcgcctgcttaggtgtgcttgaaatggcataagcacgtgtacaataacttttaccaatatgaagttttaaagaaatatattgacctgcttggaaatatgcaagtttgctggtaccttttgattcatctggtacaaatacaaagctcttagcatcgtcacggtcaataatcttagtgattttcaaatattgcgtttcaggatgaagctcctcttcaagaatgttcatcggatattttttaggcaactctgcatccgaagcattttgaatttcatgttttcgctcattttgaagcttctttaaatcaataattcccttaatctcttcaaatttattcatgatctgctcccatattattaatatcactaacagctatttttgctgcagttaaaccagtagtgtatgaaacattgtaaccatcacacataaatccatgaccaccgcagaaatataaatgtggcagtggatttacaacgttctttaaatccattgatctaccaataatttgatcccatggtgcacaatgatagccataaatttcaccatcaggtgttcccatatagcgagcaaatgttggtggtgcagcaattgcaatctcttctatagaatcactaattttaatacctgttgcctgttcatactcatcaatagcatttttagctattttaactttaagtttttcataatctttgggtttaacattatcccaaacaccatcatcaactaatttagtaatgtagcaaacactaattcctttaggagaagcatttggaatgacagtatttaagcaattcatgatcataaaatcatttttatccatagttttacaattttcatattgttttctagtatcacctgttgaagcaatgaacacactatagtcatttattccaagttctcgacaggatttatttagcccaagatacaccaaaaaggcactggttcctaatttatgtgagtttgcatattttaaagcatactcaggaatacacttttgatccatcatgttgccataaactgcgtgaggagtaattccacaaataacttccttagcaaaaactttttcacctttaatttgcacaccaacagcttgaccattttcaactaagattttttctacagttgtactcagccaaacatcaccaccattatcataaattacttgtgccaatgctgttgacatatcatgacttcttctttgaggaatataggcatcgttttctacataagtagctaacatagtggcaaaatacggaaattcaaattcatcagtgggaatatcaatgtaacaccaatatgctccaagaatttgttgagcttttttaggaagttttaatttgttaagcacatcatcccaactcttagtagcatactcgataaaagctggatatttttttataacttcttttttatcctttccatctgctatttctgctaacgcattcatactttgctcacacagatcaaaaagcttttccatcttttctgaagtacctggtacatatttttccatcgcattaataaaattttctctaccagctggcatcttaacatcaaatccgtctttaccataaataatatagcgataagtatctggtaattcttgcatttttacgttggcacctaaccagtcatacatttttcgtactgcacgcggattatcagcatgaccatattcacataattcatgcaaggctacttcaaactcaaatctgccgcgaataaaactggttgctgctccaccagccagattatgtctttcaatcaatagagtttttttgcccattctagcagaacttgcggcggccattaagccgccattgccagccccaactacgataacatcatatttttcagccattttttaaccctttcgttttcaaatgattacgttttcattataattaatatgaattaaaaaaaggatcaaagtaaagaaaaacaaagttattttatataaactagccgttggcttctggtcctaccagtgcaaaggagaataatatgaaatttcacccaataaatgtacccactgcaacagatttattcttcgttaatcaattaaaaacagcaatcttaacaggaaagtttaacctcggcgataaattacccagtgaaagagttttacaagaacaacttcaagtaagtcgaactgtgatcaattccggattaaaaaaattagcggcattacattttatagaaattcgtcctagatatggggcttttgtagcagattatcgtgtcgatggcgatttgcaaacaatgaacgaaattattaatttctacgggggacattaccgaatttcacttttaaattcgatttttgaaatcaggaaactaattgaaaatgatgttgttcgcttagattgtatagaacaggatgaacaatgcctgcaatcagctatttcaaatatgcaaaatcttgccaaagccaccaattccaaggacgctgcacaagaaatatttgcttatgtacatagtttagccttggcctccaagaattatgtttatcctttgcttatcaataactttaaatcaatctatttaactttaggtgaatggatctgtaatgaagtcgatgttaattctatttctgaagagaatctaaaattaattaaattaatcaaatcaggagataaaaatatagcaattgcttataataacaaactgattaattggagttacgagattttaactaagcaataaaaaaacggtcgatttgcttttcgaccatttttacgcacgttttgcgcgcgattatttatttaaaacatattttgtagatctaccctcaccaattctctcaacataaccttgctttgttagttgtttaagtagatttaaaacttttgttttaccaaaattacttgctcgactaatttgtgtagaagtatttgcaccctcgcgaatggttctaaatactttcttttcatcatcgcttaaatcatcagtaataaattttagaattggtaaaattatttttattgaattttcaaagatctcgaactgtggttgaactaaacttccttgataggaatctttaattctctttattcctgtaccaaattgttcaattaaacccaatctaaaaaagacattagccacaataggatttcttaaaatagaaatttgacctgacagatactcatctttactcaagttatgaggtaatcctcctggagaaactacttctattcgattatcaaacatagaaactttaatttgagcattaatattccaagtcctatgaaccaaggcattagctattgcttcacgaaaagcttcttcaggaatttgacttataacgttacgagtaacaccatgtatttcctcacgctgataatactgccgatatttttgaatagtttggtcatactctttaagaattgattcattctcatagtttgccctatccagcataatattaatattttcaccaaagcgaacgacatcaatcccacgataatgatttttatctgctaataattcacccgcattagtatatccggcattcttctgttctagattaagagtaattagcacatcggatgtcaatttattaattcctagtttttcttttagtgccatttctaaaatattaaacgatagattttgatttgcagctgttaaactgtcataagtcttattttcgccaatcaaaattagttgtgataattctgttctatccacttcaattgaagcactatcatttcttttataagcttttgctttatataaatatggtggattatcgccctgttttaccgtcaacgtgactacattagttttatcatcaatctctaaattataatctggatgtggctggatggaatcatttattttattctctacatttaaacaaaaatcaattggattttttacaccaataattgttccatcatcctttataccaaatttaacttctcctgtaccataatttgcatacgcactaaccgtttttaaaaatgtgtttgtaagattctctttaaattctaaattctttgtttctctcacttaagtcaccttgccaatctattttatctacaattatactctttcgcacacaaaaaaacggtcgattttattttcgaccgtttttacgcacgctttgcgcgattatttatttttcgttcacgataatcaatgacttaattgcttcacgattgctcattgcttcgtatgcttcttggatatgatctaaatcaaaactcttagtaaatacttttcctgggttaatttttccatcaagaacagcttgtaaaagaacttctttatcaggcttagttactgaagcaataccaccgcgaagaccgacatttttccagaataattggtttgacttaggctctgcatgtggtacacctactctaccgattaccgcacctggacgagcaatttgaccagcttgttcaattgcactttcagcacctacacactctaagaatgcatcagcaccttagttaaagccagtacatctttaactgcttgatcatcacgacttgaaacaatgtcagttgcaccaaattcttttcctaattgtgcacgatcatcgtggtgggataaaagaatgattttttcagcgcccaacaacttagcaccaataacaccggcaagaccaacggcaccatcaccgataactgcaacagtatcgcccttcttaacttcagcgtttaatgctgcgtggtaaccagttgccataacatctgacaatgtttgaagggatgccaattgatcatcagtataatctcctggcttaccgggaatcttaactaatccagagtttgctggttcatatttcataaattcggcttgatagccaccgttagtacccggcttcaaattcaagcaattgccttcaaaaccattaatacatgcaacacaatgaccatatccatgagtaaatggtacgagaacaaaatcatttggtttaatattagttacctcatcactaacttcttcaacgacaccaattgcctcatggccaattaaagacccactttcacgatcagcaattcctctaaaccaccataagtctgaaccacaaacacttgcacgtataacacgaataattgcttgattttcaccatcgatttttggctttggaacttctcttacttcaactttacctggttctacaaaaactgctgctttcatattatttctccttactatcgtttactttatatacatagtctaatcaaaacagactgtctataaaattactaatattaaatgctactattcaaaaaacgtatagtaatttcatttatgaaaaagaaccgcttgcttaaaacaaacggttctaactattagttacttattaatcttcatcagtattttggtgctcttgactgtcatttttttctttttcataatccttgtcatgatctttttcatcatcttcagtctcagtctttataatcttctgatttttagcatcaatttcaacttcggttttcttacctccatcttcaaattctactttccagattggctgatcatcatccatttctaatgaccattcaacaggttgacctgatacctgagtttgagccaattgagtagcttgctctcgagtcatcatattattaagatctaatgcttgcgcctcatcatctgaatctaatttttcagattcagcttttaaaatattgccattacttgcatcaatcttaactttgtattcattttgtgaatcaaaaccttcaatttcatacacatatgaattcttcttttgctctagttcaatctccttaattgattttgagccatacttttcataaaacttattaactgcatcttcttgagaaagattaatacttgcagtacctgtattactttgattttgttctgtgttattgctttgactctgttgcgtttgagtgccagtagaagcattagcctggttaatcgccaataaacttgcgccacccgctgctaagcctaatgcagctgctgccaatgatacttttttaatgttaaactttttcataattgaattcctcgcttttcgtattaattaactttgtacacttagtttacgaaaaaaggaacctttaaaaaccaagatttaatgtagatcaaatgaaattttcttcattttagagttttttctaattaaattgatttttcaataaatatcctatacgcgtggtgctagttaaatcgttctagacaatatgccatattataagctaaaatagctatttctagccgctgttgaaagcctactggacttcttgctcgattattctcagcgttgtaataactaagcaaagaaaagtcgctttcaatgcttcttctaattgccatcaattgatgatcattatgccttctagctccttgcatatttttacgatatggcgtccaaagcacatatcccatgtgctttagattagtagctagatttttgcttaaataaccttcatctcctaaaagataatggttggctggatgagcattgatcatcaattctactgtctctttggcatcatgtactgacgctttagtaactgcatagtcaagcagatagccatcatcgcttactattgcgtggaccttgaagccataataatagactttcttggttgctttataaccaatatcagctacgccccgaaagatcttgacacgataattgcgaacaggctggcaaactggcactgggaaactatcaataatcaaaaattctccagctgtctttacttcttgattccaagcctgacggatacaacgaattagaggcaagagcattcgagctcgacggttaaaacgagaatgagataagccaacgaagaatttacagaatcttcgttgagattcaattccaatttcagtttgccaaatgagcatcgctaagatagaactattaggaagcttggtctgatcaacatttttacgatgtttaagtccatcaggcgcataaagcttatacagcgagcgacaaatcacatttaaccgattaaaactaacttgtaaatggtgagaaaaacgcttaagcttgagatagttcaattagatcagactcttttctatttaaattacttacaacttgagtctagtctaattggacttttttattaactaaaacgatttaactagcaccacgcgtatcctataaatttgtctcttttttgacttgttctagagcctttacctgtgcttgatctaagggacgatactcattcatcttattaagtaattcagttaatttgttggtattcattttatcactctcgtgttcattagttgcttttgttaattcattttattatagaaccctcaataatcactaaaaggaatttcaaaaagatttagcgtattttatcacctttggaatttttctaattaaaaaagttattgacaaatttagaaagcggttttattctaagaatgaattaaataatgttcttcgaggcagggtgaaattcccgaccggcggtaaagtccgcaacccgcataagcggttgaatcctttaatggtaccgatagttacagtctagatggaagaagaataattttgctgtgctcttttctattttgatagtaggaactgtacttaaattattttttgaatgttagttagaacctcgaggtaattcttcgaggttctttttttgttctgttaggaagtgaaagaaatggaaaacagtgatgaagcatatatgcaattagctatccaagaagcgaaaaaaggactctatcaaacatggaagaaccccatggttggagctgtcatcgttaaagatggcaatatcttggctacaggtcatcatattcgttatggttattatcatgctgagcgtgatgctatttcaaaactaactccagaacaattatttaattcaaccctatacgttactctagaaccatgcagtcattatggtaagcagccaccctgctctgatttaattgtctctagcaaaattaaacgagtggtaattgcgcaagtagatccacatcaactagtaacgggtaaaggtattgccaagttaaggcaacacaatattcaagtaacggttggcgtattagaagatcaagcaaagaagctaaacaagttttatacttacttctaccaacataatcatccatggataacgttgaaacaggcggtcagcttagattatcgaattaatgaggctaaaaatattcgcactcaaataacaaatgaaactgtttatcagcgagtacatagagagcgcgcaaattatcaagccatcatgattggatcaaatactgccattatcgataatcctagtttactgactactgtcactacggattttccacccattcgaataatagtagatcgacgtggtagattactgaatcatttaaatattaagttattaacggataagttaagtccaacttggatttttactcaaaatacaagcttagctaagactccacataatgaaaatatctcaatttttttgatgaaaaacgcttcaatcaccgaagtcataaaaaaactgaccaatgaagagatccagtcggtttatgttgaaggtggtcctaccctagctaatgccttgctagccgaaggtcaagtaaacaatttaattacttacataagtccaattttacttggtcaaaaaggaaagctaggaatttcacccagctccaaaacaactttacataatttacgtgctgaaaagttggatgataattttagaattgaaggtgaaattaatgtttagtggtctagtacgcggcgacgcacgaattgctgctattgataaaaacgatgaaactattgttatgactgttgcttgccagcccgactttactaaaaacttgcaaattggcgattcaattgcagttaatggaacctgtttaactgttgagcaatacactgatacttcttttgtagtaacgatgatgccacaaacttatcagaaaactacttttaagaatttggatatcaatgcccaattaaatgttgaacgttcactacaggtcggacaaagattagaaggtcatctagttactggacatattgatgatattgccaaagttacggaaatcaggactaacgaaaatgctattgaagtttggtttgcctttcctactcgcttaaaaaatcagattgtagcacaaggtagtattgcaattaatggcgtatcgctaacagtaatggatacacatgataatgttttctcagttggattaattcctcatacacaagatgaaacaaatttaagtaagttaaatgtcggctcagaagtaaatattgagactgatatcttaagtaaatatgtcgctaaaaatttagaaaagagaatttaaaatggacgtaaaaaaaattcaaaatgcaattcaatggatgaaaaatggtggtttagtgattgttgctgatgatgaagatcgtgaatctgaaggtgatatgatcggcttagggtctaaagttactcctgaaaatgttaactttatgaccaaacatgctcgtggcttactttgcacccctgtaagcaaaacaattgcccaacgtttaaatttctaccaaatggaacaaaataatactgatccatatggtacagcttttacaatcagtgttgattacaaaaccaccactactggtatttctgcttatgatcgtgcggcaactatcaaggcaattgctgatcctacttccaagccagaagacttctttagaccaggtcactgttttccattagtcgctaaaggtgatcaaatcaagaatcgtaatggtcacacagaagcttctattgccttagctcatcttgctggcgaaccagaagttgcatatatttgtgaagttatgaaagctgatggccatatggctcgtcgtccccaactgaaagaaattgctaaagaatatcacttaccatttttaacaattgcagaactacaagaatatattaatagtcctgtgagtaaacgctcagagtttgtaaattttcccactaaatatggcaatttcaaaattaaggctttcgccaatgaaaacttagctattattaaaggaaagattgatcctaaaaagccagttttagtacgtcttcattcagaatgccttactggtgatacgtttggctcaatgcgctgcgattgcggtgatcaattacatactgccatgaagcaaatgaataaaaatggtagtggcataattctttatttacgacaagaaggacgtggaattggattaattaacaaattaaaagcttatggtttacaggaccaaggttatgacacttatgaagcaaatgaaattttaggttttaagccagatgaacgaaattatattattgctgccaagattttaaaagatctaggtattagtcatatcaatttgcttactaataatcctgataaaattgatcaactagaaaataacggtattactattgaaaaaagaattcccttggaaattcctgctaataaggtaaatcatgactatttagaaactaaacgagataaattccatcatttattagaagcactatagtgaggaacacagaaatgaatatttatgaaggaaattttaaaaacaataattatcacgttgcaattgtagcatccaagtttaacgaaaccgttacccatcatttagttgacggtgctattgctactttaaagcaatttggagtacttgaagatcagatcgatatctattgggtcccaggtgcttttgaaattggttttactgctaataagcttctcaattcaaataactacgatggtattatgactttaggcgctgtcattaaaggtgagactgatcattacagcatgattattcagaatgttacaaacgcaattatgcagatgaatcttaaagcagaagtcccaataacttttggtattttaaccactgagaatattgatcaagccttgcaacgatccggcttaaaagctggcaatgaaggttcctctactgctcagagtctattagaaatgatttcgctaaataaacaaataaagtaatagagtagagggagattaattctcgcccctctcattgcaccggacgtacggttccgtatccggcgctacgtttgtaatcatctacgagataaatagtattctagcggatcgaccaagcctgggcgatccgctttgcttatgcccaatacttttgggctaagcaaaaagttaacaacatgtccggtactgcgtttataccaacctaatcgcgtattagctactttatgaatatcttcgtcgctaaaattgcactttaatgccttgttaatccgcattaaattagtgtatattcttcttggcagtttccattgtttaatgattactacccgtatcttatggcgcagccattgactgaatttaaatagaaagtatttcataccgccaattttaaagtagttaatccaacctctgaccacttgatttaccttagtaaagactaacgatagaggttgagcagctgctttcctgcgacaaagaagctctctaatcttgttataaagcttggacaggattggcgaaagcggtccgccttgaggcacgccaatcttattgggcttaaccaaaccatcttccatgataccggattttaagaatgaccgaatcaaatggagggtggttttgtcatttactcgttctctaattattgaaattaatttatcatgattgaccgtgtcaaaatatttctcaatatctaaatcaattacccattgatatccatcatcttcatgattgcgtatttaatttctgcttgatgctttctgaaatagctatcaagttcttcaaccattcttttatctactcccggagcacctttattaatcttgactctatgaatcgcttctttaagattgctctgacttagaatctgttcaattaatttcatctcgtaatatctccatttctacttgtaaatttattcagaatcatcccaattgctttcaccatcaaagagttacgttctctttgtgctaggctatcctcttattcggactatctgaacattgcttatagcgggatatgctcttacaaacattaggtccttcgctccagtctcattacaagactttcaacactactatgacctcagctgacttcttgcgactaacctttttcgaccaggcttacgatcgctgatgttaaagcttgctcagcttgcctgtccgcaagatctctcggggtaagacattcatctttgattttccactgcctcctggtttaccgtcttgactttacgtttgtcttttggacttcgacttgtatcgcagccttatccgccatttggcctaaccaggtttctgtacgtaggctcggaaaactcgctagccacttccttcacccatagcgtcaccgctatcggcttgtggttcactacacttggcgacaaatacccgtggtccaaactttcattggattagatgaaatgtcatgcccgacacacaagtaaaaagccaccgaagcactaatacgcttggtgactcaaaggtctaattataagtttcttctactagtagctcatatggctttagcaagtaggtagctcccgtttctttgataggataattttgcacaacaacttttttgcgggaaatatgataattaacttaaacttcccacacgcaaaattgcttgtttcattgtgattctgcgtgttttgacaaatataaaaggcacaagtccttttcattgctataattatattgaccaaaacataatttatttgcatgaaaggcttgtgccaatgtctattttaccatctcctgaccaacaaaatgaacaactattttccaactcaatcatcagcttcatcaagaagtttcaggtgatcaagctgttgagaaaatgtggcttccgcaaggaaaaaggcattagcctgttcagcttgtttctttacgttttaagcaatgtctttcgtgaccgcagcttatatatgcagctgaaaatggatcattttcaagaaaatttttccaagaactcatattaccgttttatgcgcaacgttcacgtcaattggctccacttcaccacacttctgtctgcgcaaatcattaataaccacttgcgatctttgacttcagaaaaacgggctgattgctttgttgtcgatgattcctacttctctaggaccggcttcaagaaaacagaattagtcgccaaagtttttgaccatgtatcaatgacttacaagaaaggttttcgcatgatgaccctgggctggactgatggagcttctttcatgccaatcaattcagtgctgctgtcttctcagaagctacagaatatgattggcgaaaataaagtttttgatcagcgcaccattgctggccaaagacgtatgcttgcccggactaaaggcacagacgtgatggttaatttaatcgaccaagctatgaaagcaggtcatcaagccaagtacgtgctgtttgacagctggttctcaaatccacatcaaatcgtccagctcaagcaaaggaagctggatgtgattgccatggttaaggttagctccaaaatcaaatatgaatttgagggagaacgcaaaaacatcaaacagatttatcgcagctgtaaaaagcgatgcggccgttctcgctacctgctgtcaatcccagtcaaagtcggacgccaggacaaagacggtgctaaaatagatgcacggattgtctgcgttagaaaccgtgccaatcgcaaggattggctggcaatcatttgtaccgacatgtcgcttagcgaagatgaaattatccgcaactacggcaagcgttgggatattgagggttttttcaaaacttgcaaaagttatctaaaactaagtacggaatatcatggcctgtcttacgatgctttgaccgctcatgttgccatagtttttactcgctacatgcttatgtcagttgccaagcgggacgatgaagatgaacgcacgctaggcgagctgttctattgcatgattgatgagctggcggacattacttttagccattccttgcaattgattactgatgcaatgctggccagcgtaaagcaagtctttcatgccagtgaagcacaaatagctgaattcacggctgactttatcaatcgtttacccaaatacatgcaaaaattgttaaagaaaactagcaaaaataatatagaagcctaaagccaagcaagatcaagagattactggcttatttagtgtgggaagtttaagtaattaattcttcctgaattgtcaaattaagtgcaacagttaggttatgaagagatatattgcttgaagagttcttctgctgtctgatattggaggattcggcgatatttgtggttaatggcattggttgcctgttgaacataagcttttgacttgtctttcatgtgcttgcccgatagtcaggaatcttgataactacttcaaagcgtgtggttctttcagttaaagtcattaaagcaggctgattcttgtgcaaagcgtgaccgccatggctgtgatgacgcttgttcctgcgtcttttgagcttcataggcagatcatgtccaccaagccctgatcaatataacgatagacagtagacgtgctaggacaaggatagcctggcatagtccttttgaattcaccaacgaattcatcaatgctggtggcatcaaatttagctttgaagcgtcttgagaacattcttaaaaagacagcataatgcttcaatgaattgcgctgatagcagtttttgcgacgcttctcataataaatctgtgcagtatcagcgtaatagtgctcatacaacaaatagctgctgtctctttgcaggacgcttccgcgtttgatttcgcgactgattgtcgatttatgacagccaacttcttgagcgatgacagtacgggaagttataccagaatccagcattgcctgaatctgaccacgttgtacgctagttaattgatgatagtgtttagaaatgctagaatttgaattggtcatgaagatcttcctttcttgatttttcgtcaattcaagtttaggtcttcatggcctttttgtttaacacttagtgttgcacttcaattttaaatccaggactcatatttttttcactgtttttatttttttgtcttgatcgaatatagcttgagcaatatttttggtaaaatcattcatgaaggagttcctttctcgtatgattggtttgaacaaaaaaacacatacagaaagaagaactccttcatgaatgattttaccaaagattttgctcaagctctattcaatccagacaaaataaatgatttattgcgcaaagagctacaacaggctgttaataacttgctagaagctgaattgactgcctttctgggctatgatccctatgccagaaatggctgggatactggcaactctagaaatggtgcttatttccgcaaagttgatacgcaatttggcccaattgaagtgcaagtgccccgggatcgcaacggtcaatttcatcagcacacgctgcctgactacaagcagcactcggatatcttggaaagcatgattatcaagctttactccaagggcgtgaccaccagggaaatagccgatctaattgaaaagatgtatggcagccattacagtccagctcaggtatcaaatatttccaagcagatgattccaaaggttgaggcttaccacaaacgcaagctaagcgacaagtttttctgcgtctatttggatgcgacataccttcctttgcgccgagaaacatttgagcgtgaagcagtctatattgccattggcatcaagcctaatgggcacaaggaggtcattgactactgcattgcgcctagcgagaacattgaagtctggacagatatgcttcaaaacatgaaatcccgaggcttaaagcaagttgagctttttctttctgatggtgttgttggcatgaaaacagccttggccaggacttatcctaaagctcattttcaacgctgtttggttcatgtcatgcgcaatatctgcgctaaagtacgcgtcgacgatcgtgaaaagatcatgaacgaattcaaacaggtgcatcaacagacaaacaaagaagaagccacagctgtcctgcatgacttctataccaaatggggcaaggtttacagccatgttatcagaagcttgaaagacatagaaccagatctgctggtcttttataactatcccaagcagatcagagcttcaatttattcgactaacatgattgaatcatttaacaatgtgatcaagcgcaaagctaagcctaaggcagagtttccaactgaacagtcgcttgatgcttttattggcattcaggcaatgagctacaatgaccgttatttcaatcgaattcataaaggctttggtcaggttcaggacaccttagaatcctactttgattaaataaataattaaaaaatcaatttacgagaaagatctatttacacaaaagatttgacagtttctaattaatgctgcatcgtaataattcgtatcagtcaaacgattagtaaaaacatactgttgtgaaacaaataaattatcaaattccggtttctttaattgttgcactgcaaaaaagatcggagcactaatactcggtgaagcataattgtttaacgctttaccattcaattgatagccagcagtcacttgtttttgcttgctgaaaaagcgtaacattttagtaataattttctttgctcgtgcatctttgctagtagctaaaaataatggtacgcgacaagcattgccagaataatcaccatcattttttccagctacttcattggctttagctggtctaacaccttttttactaatccaagcaaaatctggaactaagccagaagaatgttgcttgctcaattgatatagttttgtcagcattaccttcttgatcgttaaccattgagaattaccagtcaactgataaaaatcatcaaagtacgtcggtaacacgtcagaggttcgcattaagtaataatacttcgatttcttattagcccaatcaccaacagtcagcgtctgagtagtcgaattataatcataacgtaagatatcagctaataatagcttagcctgctgcaagtacttgggttcgttccagagttttcccgctttaatcaaactttctgcaatgtataaatcgccatcagttgcattagtagaataaacttttttatccacttgcttccatgacattaattcagtttgttgatcatcgatagtcaaccgattagccaggtaaaaccgatataaccgttgaaaatcttcttttttagcccaccccttttcaccagccatagcagaaatcaacatgccatagccttgaccttcagacaagcttgtgcgtggtgcagcttttatccaagtttttccatcactttcttcaaccacataatcttctttccattgacggtacaaattacgatgcaaggtgcggttattactaccacgaacataaaacatgatcgcgataaaaagcccaatagtcagtaagatcaaaattggggtaatcctgtttttgttttttaacatcaatctgtaaacctctttgtttttacccacttcgttgcttcgcgatggaaaagtctgtcagcaattgctgaccaaaccgcattaatcgatataatgataaacagttgtgagtatgtaaaatatgatgccacagcaagccaaagttgtctagttgtaacctgaccaaattgggtactggcagccacactgatttggagtacatagagtagaatcatcaacaaccaattaaaaagtaatacttgactgagcaatagattcccagcagtaaaagtaaatggcatctcaactgttggtacccaaatttttattactgcaaaaatcagattaacaatgaaaaagatatctgataagactactgctgcattaaaccagaaaaagatactggacatataaaaagtttcaagtttgacccgccaattactatggtcaaataaatgccgaaaattgttaattactacttcgtaattacctttagcccaccgcaagcgttgataataatagtcctttagcttctctggttcttgttgaaaggcttcagaattatgtgctagggcaattaatttaccagtgcccaaaatcgtaaatgacaaatcagtatcttcagttaaagcaccagaacgaaaaccacctaactcttttaaaaaagccgtcttaatcacaaagttagtgcccggaatgcgcccaattttgaataattgccaaactccgcagtgctgaattcgatgcgttaccacaatttccaagtttatacagctagtcaaaaagttttgctttgcattccgcgtcttattccgtccaaagctagccacataacgttctggatcttccaatacctttttgatcaagaaatacaaggcattttcttcaggcatcgcatcggcatcataaacgcataagtagtcgccgtggatcatcttaagcgcatcgttcaaaactcctgatttaccaccttcaccagttcttctgatcactttaaactgtcgtttctgatattcagtccgattgccaatggcttcagccaattccgctgttcgatcagtgcaattatcagcaaaaatcaaaatttcgactttatcttctggataattcaagttcagaattgctttgctagttttttgaataacagcttcttcattatgagccggtacaacaatagaaacggtaggataatactcaagtggtgtaattttagcaatttctttactgtgttttaaccaaaaaagcaccccgccccaaagcgtaactaacgaaaatagaatcgataaccaaattgaaatcaaggttagtatctgaaagccttcagtcatccaattctcctttctgactcttcattaatgcctgttcgatattgccataaattttataagcacagaaaaaaatcactaaaaatgcaattgcaaagattacagaaataatcacggacaaataataaaaccagttcattttgctatctttcctttatgtattcagtcacaatttcagtttccaattcacgacgcaaaaaacgaattacagctatcaaatcaggaaatctatcactattgtcgacattaatatggacactcgcatgttttagcgaaacaggaatcggcaactctaactcgcttaattttgtatcaacgatgtgattgaccttttttactaattcattggggatttctggcgaaattatcaaaaaagtcgcatctcccataaagtaaataaactcccccttaagtcgattatttttcaaaactttagtaatctgcttcaggatccgatcatgactattaggatgagcttccgcatactgcttatgttgatcccaactcacaatttgaacgttggaccataaatcgagttcgggatgctgctcaattttatgtagttcattctgataaaatttttccgcactatcgaaagttcttagctttaacctccggtcataaagcgaattataatgccgaatttcgtcattgcgattggtaaaaaagctccagcgaatgatgtgctgtctaatgacggtaactagactagcctcaataggataagcaatcaataataaaaatttttccttaactggcattactacatagcctaacagtaagaatcctgctccaatcgtggtaagaattaaaatcagccaagtaacatcgactcttgaaaagattaagccggttaaaatcgccaaaatcaaaatcattactaggccattaaagacattagctgggtataatcttgctagccataataacaatatcgggaaagtaacgctggcaagataagctaaacctgctaatttaaaatactttctggtcatttttataacatcatcctcaattatgctatttatttacaatttttcattgtaataatttaggaaactgtcaaatcttttgtgtaaatagatctttctcgtaaattgattttttaattatttatttaatcaaagtaggattctaaggtgtcctgaacctgaccaaagcctttatgaattcgattgaaataacggtcattgtagctcattgcctgaatgccaataaaagcatcaagcgactgttcagttggaaactctgccttaggcttagctttgcgcttgatcacattgttaaatgattcaatcatgttagtcgaataaattgaagctctgatctgcttgggatagttataaaagaccagcagatctggttctatgtctttcaagcttctgataacatggctgtaaaccttgccccatttggtatagaagtcatgcaggacagctgtggcttcttctttgtttgtctgttgatgcacctgtttgaattcgttcatgatcttttcacgatcgtcgacgcgtactttagcgcagatattgcgcatgacatgaaccaaacagcgttgaaaatgagctttaggataagtcctggccaaggctgttttcatgccaacaacaccatcagaaagaaaaagctcaacttgctttaagcctcgggatttcatgttttgaagcatatctgtccagacttcaatgttctcgctaggcgcaatgcagtagtcaatgacctccttgtgcccattaggcttgatgccaatggcaatatagactgcttcacgctcaaatgtttctcggcgcaaaggaaggtatgtcgcatccaaatagacgcagaaaaacttgtcgcttagcttgcgtttgtggtaagcctcaacctttggaatcatctgcttggaaatatttgatacctgagctggactgtaatggctgccatacatcttttcaattagatcggctatttccctggtggtcacgcccttggagtaaagcttgataatcatgctttccaagatatccgagtgctgcttgtagtcaggcagcgtgtgctgatgaaattgaccgttgcgatcccggggcacttgcacttcaattgggccaaattgcgtatcaactttgcggaaataagcaccatttctagagttgccagtatcccagccatttctggcatagggatcatagcccagaaaggcagtcaattcagcttctagcaagttattaacagcctgttgtagctctttgcgcaataaatcatttattttgtctggattgaatagagcttgagcaaaatctttggtaaaatcattcatgaaggagttcttctttctgtatgtgtttttttgttcaaaccaatcatacgagaaaggaactcctttttctaatgtttaaagaaataaatttaaggaatcattcatccttacacaaactattttacagtctcatcttttagccaagagtattgtaatagacatataatacagtacaatgattattatcaattacataaaattgatgcaattaaaaattttaatcctgaaatttttccagtttatgacaaaaagcaaaaacaagtttattactttaataaagaagacttcaactatctggacgacacagatgccactttaaagaatctacccaattgggaaaaagactcgtacaagctgtattaagaatttcaaaatgattttgaaggcaagcgttttattgctcttccgtctaaagaagatttaaacgagaatagactaatctttgattactgctgccagcttgaaaataatcaactaggcaatctgttacttgatagttttaatggaagacatgcttttcgaaaattcaaaaatacactttatcaaaatcatcttctagaagactatgaaaaatataaatatcaagccgagaagaaattagcaaccaactggtgcaaagaacataatttaatctaaaaaacactgacaggtcaatttgatctatcagtgttttttcatttatcgatcaatttttggtgcttcaccaatctgtgcttgcatcatccagattctcttttcaatatctgtatggcatgacgttaagatatcatttgagccatagtcgccttcctcgtcacttaccttaatcccttcttcataaaggtgctccaaataacgataaccagcaatgatagtcgcaaatctttctctagttgaaattccccattcgccaggatgagcttcgatcttagtatgatcaagcacttcctgtaagcttgaatatggtgaaccatcaatcgtgatcaatctttcggagatcagatcacgttgttcatccaactcgtccattaccttgtccaagtatgggtgcaatttcaaaaattcaggtccgcgcatataccagtgttgttggcgcacaaccatcattaattgagtggtgtcagccacagcttgatttaaaatttcttttgtttttggatacttcataaatttgcccctttcaccaaaaataacttactttataaaatatatcatagctgatgaaagtgattacagcaaattatttgattatcaaaaaagtgcctagaaaatcagcttcttttcctaaacacttaattatctatttctcttctttttccttgcagtggctcttgcacatacacttttgctcatcggccatcgggcaatgacaaatgccatctttaccagcgcaagggcaaccatcttggcatttcatcccattatgacaaaacttgttttccatttctgtcacctcgatgccatcattatactctaaattttttgttcaatatcactaattttcacaactaaaacagctctaatccactcgaattgcgccttcatttgatcaaaataagttccttcagtgatgaacttgccactaccgtgaatgtgatagccgcggcccataccagttgtgccaggataattgtaagaaccaaccgcgattgtcaaagcgtgctcaggatctgccttcaaatcattttgaattgagtgcatccccgcagccggaatcaaaatcgtgtcatcagccactacattaatatactgtgaccaagtattcaccacactagccggcttaccgttaatcgaaacgattgtagcgggtcccttatcacgtaaaacatctaagaattcttctgtcataattgccataatttttatctcctctcaaatttgtaaatataatataaaggctaatcccgacaaaccatgacattatttaatattttttcataatctgcttcaacttagtgagataattcttcttcaattcactcggctgcaatacctgcacgtcgctgcctagtgaaatcagataatcaaccaaatagtgtaattcttctctattatactttccttggagataaattttccctgcatcatgcacaatattcataatcgggtaagaattatacttcaccttttgctcgccattttcagttaataagcaagaatacggcacttgataataattttcttcatatttttgcaagttggcagttaatggttctttattcattattttagtttcagttggtaaaacacgaactgcctcgaatttatctaaacgcaaaacgtaccattttttcaggtctaaattataggcatgacagaaccaattgcccgcctgaaagaaaatatcgagcagctgcagtttttgttttccctgcacaaactgaaaattttccacttcaattaagctgttatcaatgcatgccttaagcaaagtcgcgaaaaactttacctcatttaaacttggctggctatagaaatgcactaattgtttctgcaacttaacctgctcttgtaaattctgcggtaggcttttaaccagtttcaattcaatttcatcatacgcattgctgtacggcgtctcactgatcccgcgaattgcttgcaatgcaaaaaagatggcgttaatttcttgcgtgttaaaccgaattggcagcagcaatttactattagtcaaatggtagccgccattgcgcccactttcagtataaaaagctagacctaattgctccaaatccgcaatatcgcgcaaggctgtccgctccgaaatagcaaaatgttcttctaattcttttagatgaaaaacttttttgtcactcaaataaattaattcttgattcaatcgttctgattttttcatggatttctgccatcctaaattagatcaatctgacgcaatttccttctcaatctgccttgttcttcgagtaaagcaaacttacgcgacaaagtttctggggtcgtaccaagatacaaagctagatctttcagttttaacggtaaaacaaaactattttgaccaatttcatttgcatacatttgcaaatatttgaataagcgctcttcaactttaggtaaagttaacaattgaatttgcttttgcatagcagaaatttttgtcatacttaactctaataatctaatgctcaattctggctgctgatggatcaacttcaaaaaatcttgtcgccttaataaacatatttcactattatcagttgcttcaacataactatgcgtattaacttgaccaaaaagccagtcttcaccaacataatcccctgtatgtaagacctgtaagacatcctcatgtccagtttcatctaatgtatatagcttggtactgccatgggccacaattactaaattagcacttacagttggatcaataactatctcacccttttgataattttgatgttgcaccaatctttctagttttattttttcatcttgtggcaaagccgtaaataatggtaccagatcaacgcataaatcagccattaaactcattcctttaactaaaagtcatcatcgtcttcttcagtatacaatccttctttgagatcatggcctaaaaaactttgacttactctaatctgttccttaatccaagcaagcaaatcaatcaaattagcagctaactctggccaattttcatcattagctaaggtaatagccttagtaataaacaaaatctgcgtatcaaaatccttcaccaagttgaataattgttgttcacctgcaagatatttgctactgccatcttcttccaacatggtatattcctgaaattgcttgctagtagtcggaatactttccccgttattaactaataaatggtttaaacgcttgaattcttcatgctcatagttcagccactctgttgccttatctgctaagaataggcttgcactgccttgagcaaacaagcttgcttgactgattttcaaagaatgaactaacaaattagaaataatatgaccagtcattgccgctgcagttggctgatgatgatcaagatcactttgttttaattctgcttgatacttttcttgtgcattcatcaattaagctccttttccttgattccttgtacttcataacccatcttttcaattgcagctttaacatctactgctttaactttgtctggatccatcgtaaacttgagcttccccgcattgaacattaccttaatttgatcagttccatccaaattatcaactgctttttcaatcttagtcaaacatgaaggacaagtcatacctgccaatttcatcattactttttccatttatctaaatttccttcctattagtttacatgtttaatgctacatcgatttgttttttagaaacttgatgatgatcaagtttttgcttaaacctaattaatcgcatcccatttaagataacaactaaaatactaaattcatgaataaacatcccactagccatttctacataaccagcaaatagaccaataaatagcagtaatactgttaataaagcaatagcaatattttcgttcatattaagaactgtcttttttgctaaatctattgcataactaactttacgtaaatcatttttgactaaaacaatatctgaaacatcaattgcgacgtctgtcccacttccaatcgcaatagcaacatctgcgttagccaaggcaggactatcattaatcccatcaccaatgaaagcaacgtgataacccttttcctgctcctttttaacaaaagcagccttatctgctggcaacatttcgccataaacttcatcaattggtaattctgcagcaacttgcttagctgttttaaaattatcacctgaaagcataactaattttttaacgcctaatttcttcaagcgagttaaagctattttagcctccgggcgcaactggtctttaataccgaataccgctaattgactttggtctgcattagcaaaaacaacaattgaatttcctaaattgcttaaatgatttatggtatgtaataattcctgattaagatgagtattttcagtaattaaattttgattaccgagataatatttttcaccagaaatagtagcaattaggccctttcctttaacggtttctactttaatcacatctgatgcttgattatctaacttggcaatcgcctgagctaaaggatgattactttgttgttcaatttgagcagcaagcctaattatttcattccgttgcccctttagtattttgatcgcactaacttccggatgacctacagttaaagtacctgttttatcaaaagcaatttcgtcaatcttacgagtttgatccattacttgagatcctttaaaaataatgccattctttgctccattaccaatacctgccactgtcgacaccggcacaccaataatcaaagcaccgggacatcctaataccattactgtgattgctagtttaagatctctagtaattaggccaactataattgcgatcaccaaaacggcaggggtgtaatatttagaaaagcggttaatcaatttttctgcatgagatttggtatcttgagcttcttctaccatttcaatgatcttgccaaaagttgtatcctctccagctgcaatagtctcaatcgtcaatgttccatcttcaagaattgtccctgcataaacctgattgccaatttttttattagccaagctagattcaccattgatactagcctcattcagatagccagatcctgaaacaatttttccatcaactggaatttgatcacctgttttaactaaaatccttgtacccggatcaataaaatcgacgtcttcttccttagtggagccatcatcttgcattaccaaggctgttgttggagccattttggttaaatctgagatagctgagcgtgttttcttcaaggtgacttcctccaaaaaatcgcccagcataaacaaccaagttacaatagctgcctcattaaattcaccaataataaacgcaccaagtactgctaatgaaactaaaacatcaattgagattaatttaaccttgatagatgaaattgccgttaaaacaatcggaattactccaataatccccacaaccagcattaacaactggtatggcagatttaaatgtaacaaccattttgatccctctgccaacaataacaaaattgtatttaaaagcaggatttgctttttatactttatgaaaaagcgttgtactttaatcattttttcccctttcctttacctgacgattattatcataaaagcaaaagaactctaaaaacttgatgatgatcaagaaaatcaaagatttataatttaatttctgtcaatatttgtcagtatttgcgactataataatcttcagagaaataatgagcaagaaaggtgacaatcatggttgatattttaactaagcaaactactaatcaagaattcttagactttgcggtcgagcaagttcacaacgccgatatcgttactactcacgcaggcgagcctagcgcccaagtttgcgacttattattgaacaaaaacggtaaattatatatcgcaacttcaagtcaaaatccattttttaaggatttgattgctcagccaaaagttatcgtggacggttacaaggggggacggaacgatggactattgcggtttttcaattcgtggtacaatcaaaaatgttgatcacttatatcttgatgaaattttcgccaagaatccttatctcaatgaaatttatgccgatgacctagaaggtgctaaaaaagatttacgtgtccttgaaatcacgccaattaccgcgggctacttggattaccgtactaagccagtcttcatgcgcaacttcaaattctaaacaaaaaaatcagagctatcatttcgacggctctgattttttgttttttcaattaaaagaagattttactcatgatgatcataaagaccaacaaacaagttgagctgattgcggcagcaccgaacacggcaccaccgcgcttgaagatcaccttgaagttaactgagattcccaaggcagccattgccatccctaaaaagacatatgcggcttgcactaagagatccagtgtttgagcagataatggcaaaaatgtcccgataatactcgttaagataaagccacccaagaaccaaggaattggcaatttctttggcgccttggtatgttctgcctcactttcagtcaccaaacgcttttggtaccagtaacccacgattaaagcaaccggtgctaataacaacacacgtgacaacttcataattaaggagctatccaagctgatctcaccaaacgcactaccagcggcaaccgcgtgagcaatttcatgtaaagaaccacctgcgactacaccatattgtgtgtcggttaagccaagcagcggcttaagcatgatctcaagtaatgtgaacatcgtccccatcacacagacaacggccactgccaaaacttcattttctctttttctttcttcatcagtggtctcaatctgtggtgacacacccatgacggcggccgcaccgcagacaccacaaccacatgctgaaagaatagcaagctcatcttcggcgccaaatttgcgactcagccaataagtaagcacgatcgtcccactaactgcaaacgctgcaactaagattgtcttcacaccagcatcagccaacttggtcaaattaagccgaaagcccaacaaaataatccctaatctcaaaaacttgttggagataaaacccataccacttttagcttcagtctgaacgctctgcggcgtcacttgcaatgcaatccctaacagcaatgcaattaccaaagctccaattaagtttacatatggcaacttagtcaagaaaattcctgctacagaacaaaataaagtcattcctgcagctaaccaaaatgatttagttttaattatgtttgtcaacaaaaatccctccgtatgtgatcaatttaatttgacaaacacaactcccttaatgatgatgtctataagtttactcttgttttctatctttgacaaggtatattgttaattatttcacatttattcaaaaataaaaaaagaccaagtatctgcttgatcttccacatattgacaaaaaggagtgtacaggatttgaacctgcgcgccaaggaaaacttggttcgccggatttcgagtccggtgcattaccactctgccaacactccgtaacaaaaatattataacctattatttgaataatgccaaaatatctttattattttgactgtctttttgtctccgtaactgctacactttgcagtagtacatcgtactagtaaaagatatagaaaagagaataaattatgtgtacttctattatttttagtccacaagatcactatttcggccgtaacctcgaccttgaagttacctttggccaacaagtagttgttactccacgcaattacgtcttcaacttccgcaagatgccagagatgaagcaacactacgctatggtcggaattgcgcttgacgctggcgattacccactttactttgacgcagctaatgaaaaaggtttaggcatggccgggcttaactaccctgacaatgctacttactacgatgtagttgacggtaaggacaacattgcttcatttgaattcatcccttggattttggggcaatgtgaaactgttgctgatgctaaaaagttgcttgaaaagatcaacatcgttgacatcaacttctccgacaagatgcaagcatccccacttcactggttaatcgctgataagaccggtgtttcaatcgtggttgaaactgacaaagacgggatgcatgtttacgacaacccagtcggctgtttgactaacaacccacaattctcaagtcaattattcaacttaaacaactacgccgacgtttcaccagcaatgcctaagaacaacttctcttctaaggtagcaatgaacggctacagccgcggccttggttcacgcaacttgccagggggtatggactcagaatcacgctttgttcgtgtagccttcaacaagttcaacgctcctgttggcaagactgaagaagaaaacgttgataattacttccacattttgcattcagttgaacaacaaaaaggccttgaccaagttggtcctgacgcattcgaatacaccatctattctgatggtaccaacctcgacaagggtatcttctactacaccacttacaccaacaagcaaattaacgttgtcgacatgaacaaggaagacttagattctgctaagttaatcacctacgacatgttgactaagccaacttttaaccaccaaaactaaataattaagaaataatgttaattttgtctaaagattagcattatttttatttttacggttaaaatagatgtacttattaaagtaattggggattttcttattaatgaataattattttgtgttgctgctttcggcggtaattttactctggcttatttttaacatcaaaaattcacgtcgttttaacctttttgaccattggttacaccaccagttggtgaaacgtcacgacggttatagttggcaagtcatcgccttcatcaatgatcctaagttaatggtagtttgggatgtgctattagcaggattattactaaatgaagagcgtaatttgactgccctttgggtgttagggaccttgggctttgcggatatttctggtattattttgaagaaattaatccgtcgccagcggccactaatgcattccgacaaggaagatggctacagctttcctagcggccacgtacttggtgcgacaaccatggggttaattgttttgcaactatttgccaaggatttaggtaccggcttcgtcattgtggtcgttgcactatgggccatggtgatcttctctcgtttgagtttgaaggcacactacccctctgatgtattaggagcaaccagtttagccatcgtttgcttcagcatttcacaacagctatttttagccatttaaaaagatcacgtttatcgcgtgatctttattttttattcgtgaaagccaaccataatgccgccttcttcggcgtagaaactacacaggccatgcatcggtcgaatcgttatttgcgcatcaggatattcggctaaaatcttttccttaattgtggcagcgtctttttcattttcgcaatgatcgattatcacttctccaccgtgataattatcttccttcatgtacttgataatttcacggatggcctttttcattccacgagccttagtaagtggctcaagttttccttctttacttgctgttccgatcaagttgattttgagcaaacctgcgattttggctacagctggtgaaacacgaccgtttaaagataaattatgtagtgattgcaaaacaaaaagcaaatgagtctgcattctaaacttagcaattgcttcttctagatctacaaagcgcatttcaccttgcagcattttctcaataccatggactatgattgctagctcaggtcccgcacttcttgaatcaactactataattttactcaagggatgtttttcctcatacattgcttttgcctgaagggctgaagaaaaagtgccactcatcccgctggtcattgtgacgataatcgctttttctgttccttcaagtgcgtcaagccatgcttgaatacttggacaagttgttttgcctgccacattattttggtttatattggacaaaaattccttcatattcaaatcttgattatcaaggtagtccttaccaccaaaagaaattgtcagaggcactacttccaaattacgcgccggatcattattcatattggcacttgagtcaacaattaatttaatattttccattttagattccttattttttgtatttattttaatacatatattatagtcctttgatatagagttttttaggctgctttactaatttttaaaatgtaaaccgctttcatatgtttacaccgtcacaaagttaggctaaaatttgagatgtaaagcggagcaaaaattgttccgtatggtatgaaaaacataccataatttttgaggaggtttattaatgctcaaatcagttattgaaaatgtacacgcacttgaaattttcgactcacgtggtaacccaactgttgaagttcacgttactctttcaaacggtgtcgtaggtaaggctgaagttccatcaggtgcttcaactggtgaaaacgaagctgttgaattacgtgacggtggttcacgtcttggtggtaagggtgtttcaaaggctgttaacaacgttaacactgaaattaacgatgctcttaagggtatggacccatacaaccaaccaaagattgacaagaccatgattgacttagacggtactccaaacaagggtcgtcttggtgccaacgctatcttaggtgtatctatggctgttgcagttgcagctgctaacgatgctcaccttccattgtacagataccttggcggtactgatcttgaaatgccacaaactttccacaacgttatcaacggtggtgaacacgctgacaacggtatcgacattcaagaattcatgatcactccagttgctaagacttcattccgtgacggtttcgaaaagatcgttaacgtataccacaccttgaagaaggttcttgaagacatgggttacgaaactggtttaggtgacgaaggtggtttcgctcctaacatgaagaactcagaagaagctttgaaggctcttcacgaatcaatcatcaaggctggttacaagccaggtgaagatatcgctattgcatgtgactgtgctgcttcatacttctacaacaaggatgatcacaagtaccaccttgaaggtaaggttcttactgatgaagaattagcagattactacgacaagcttttggacgaattcccagaattaatttctatggaagacccatacgacgaaaacgatgttgacggtatggttaagttcactaagagccacaaggaccgtatccaaatcgttcttgacgacttcatttgtactaaccctgcacttttgactaaggctatcaaggaaggtgctggtaatgcttcacttatcaagttgaaccaaatcggtactgttactgaaacccttgaaactatccgtctttcacgtaagaacggttacaacactatgatttctcaccgttcaggtgaaactggtgacaccttcatcgctgacttagctgttgctgttaacggtggtcaacttaagaccggtgctccagctcgttcagaacgtgttgaaaagtacaaccgcttacttgaaatcgaagaagaacttggcgatggtgaacgtcttgccttcttcccagacgatgttgatcacgattaatttcgagttaaccgagtacaatttcaaaaaaagcatgagaattaattttcccatgcttttttgcttactcatttaatctttattttactaattgactaaagattttattcagagatgtatctttaactactttaactacaattgggttgccattcctagactgatcaagcaagataaccggcttatcagatttaaggcagaataagtaagtattgtgccaagatttaaagtcatcattagcaattgccagcacattataatcatattttgccttgcccgttggactgtagcctatcttaattgactttttattcaaaacaaaccgattagttgctagcactccaggataagttgcaccctttttggtctttaaattctttttcccatcataaaactgataggtctgaccggactttttaccccagttattgactgcagtctttaacttggctgtcttagctgtattccaaattacaacagccgactttttagtcctatttttcttattctctttgattttctttttcgagtcttttttaggcttaatcttcttggaacttgaagattgtaccttggcagatttagccttttttacgtttactgttttcttattttgttttacttcaccaatcgtcactgcatctttaccaaaatgtacttgactacaacccgtcaaagtcacagctaaagtgactgcagcaatacctacaaaaatttttctattcataaatagctccatttgttatttcttatgtctattatcacacaaaacctccctctttaaccgctgtttaaataaaaaaagagctaattttcatattagctctttttaattaataaattgtaacttgataacgatttgaacgatccgttgcttccggtttttctccaatcttgccaaccggcacgatgacactcgtctgaaaggcaggatcaatccccagctccttctgcaattcgctgtcatcatttaatctagctgcaccgcccattacataaactgagccaagacctaagtctgtcgcctcaagcataatgttctctgcaccacaggatgcatcgcgctcgccaaacatgctgtcttttttagtattaattataaataatgcgtgttatcatgccccagtattaattataaataatactggggcatgataacacgcattatcggtcttcgtctcaatcttgtcgcgcaatgcttcatctttaacaaccaccaagctcattacatctgtctgatgcattccacaaggagtcgtttgaaaagcagcaattagactcttaatctcatcgtctgaaatagattcactgctaaagtttctaacagctctccgatttgtaaaaattgaattaaccatatatgcctccgtttttactttacatgcctattttagcattcaagattttattgacaacgttttcatgaataattatgatggtggtaaaaagtatagatttttatgaggtgaatacataatgaatttagcagcaattgatattggtggtacaacgattaaactcgcaacttggaaagatggcaaattacaaaataaccatgcagttgatactcctaaggatttaaatggcttttatgatgttttaacagcagaaattaataaaatcaaacaagatactaaaatcgaaggagtagccatctcctcacccggtgccgttgatcaaaagactggaatcattggtggctcatctgccttgccttacatccataattttaagattgttgacgaattagaaaaaagatttgaattacctgtatctatcgaaaatgatgctaactctgctgccttaggtgaattagctgctggtgctggaaaaggttgcaattcaatggtcttttttgttatcggtaccggaattggtggagccttaattattaatcaaaaagtttggcatggggctcatctttttggcggtgaatttggctacatgctaatgagaacacatactttaagcgaacttgcttctccggttacaatggctaaccattataatgaaagaaccggtaaaaatcttgatggtaaaaccgtttttgccttagctgatcaagatgatcccgttgcaagcgatgtccgctctactctaattcattccctggcagttgccatctacaatattcaacacagctttgatcctgaaaaaatagttctaggtggtggcatttctaacaaccctgagttaattcctctcctaaacaaagaaattgatcaaattgaagcaaattcagacttacataccttaaagcctgtcattgccctctgttcactaaaaagcgatgccaacttgcgtggagcagttgctaatttcgagcaaaagcatcaaaattaatcaaactataattgttattttatctaaaataatctttctacaagcctatataaatgggcttttttctttatgtaaattaaaagtatagatttttaactaattagatctttattttcattattaatctgatatacttatttatgtagataaataaaagtgcttacagagggagaggagaaatagatgtctgaaaagcgcaaattgccatccacctttttctggggcaactcagtttcaagtatgcaaactgaaggtgcttggaatgaagatggcaaaggtctctccgtttatgatgttcgccctgctactgacaaaacaactgattggcatgtagcaattgatgaatatcatagatacgatgaagacctcgacttaatgaaagatatgcacctgaacatgtatcgaattcaaatttcatggtcacgtgtatgtcctgatggcgacggcgacttcaacgaaaaaggtatcgacttttatgatcgtttaatcaatgcgatgcttaaacgtggcattgaaccaatgatttgtctttaccatttcgacatgccactgaatttagctaagaaatacaatggctttatgtcacggcatgtagttgacgcgttcgttcgctttggtaaaaagatgattgatcacttcggtgaccgggtaaagtattggatcgttttcaatgaacataacctttacttccaagatgaagttttcaatatttcaggttatgaacatggtgaaaagagcttagatgatatgtacaccatcttccaccatacgatgatgtgtcacattcaattagctaattacatccacgaaaattattctgatgtaaaaattggcggtatgcttgcctaccaacaaatttatccagctaccagcaaacctaaagatatttggtctgccaaacaagttcaagaatttttaaacttcaatatttatgatgctgatactggtcgtggttactcaccagaagtaatgcaatatgccaagaaccatcacatcaacatggatatcactgatgaagacaaagaaattatgaaaaaagctaaagctgacttccttgccttttcatattactcatcatgggtattatcaagtgacaaaattcctgccggtgaggctcctaaccgctaccttaaccaaggcggcgtagaagccaaatacgtaaaaactaacgattggggctgggcaatcgatccacttggcttcagaaatgcaatcactaccatgtataactactaccgtattcctattttccctattgaaaatggtattggtcttaaagaaacatgggatggcaagaatatgatcgaagatgatgagagaattgcatatcatcgcgatcacattaaagccatgaaggatgccatttttgatgatggtgctaaggttcttggctatctcggctggggcttaatcgatattccaagttctcatgctgatatggaaaagcgctacggtgctatttacgtcaacagatcaaatcatgacttaaaagacttaaaacgtgtacctaagaaatcattttactggttccaaaaggtacttagtgataatggagatgaattataatggctgatcaaaaacaatctggatttggcttatgggttaaccaacacataatgccaccaatcatgaaattcgttaacactaaagcaattaccgctctgcaaaatggtatggtttactcactgccattcattattatcggttctattttcctgattttaggaaatattcctattaagtccgttgcagatgcaattaatgcttctggttggggtgctatttttgcacaagccaacaacaccactttccaaatgatgggtttgtgggctgctattggtattgcttatgtttatgttaaaaacgaaaattacgaacctttagcaccaggtcttacttcagcagctgctttcttaatgctacaaaacttaagcattgataatccattaaaggctgctttaacttcaggtcttactgatggttcaatgacaggtaaagtagtaacagaaaacattgataaattgcctcatgctttacaatcattcttagaatcacctgttactggtgtaattaacactaagtggcttggtggtgacggtatgatcgctgcaattatcgttggtttacttgttggttggatctacacaatgattatgaaggcaggttggactattaagatgccagctcaagttccacctgcagtatctaaccaatttactgctatgattccttcaggtgttatccttacaggttcaatgttgatttatgctgcatttaatgcatttgcacacactgacttcttaaactggatctacaatactttacaaattcctcttcaaggtatttcagactcattcggtggtgctatcgctattggattccttgtaccattcttctggttcttcggtgtccacggtggtttgatcatgggatcacttgttgctccaatgcttcaagccaacactgctgacaacgctagattattcgctgaaggcaaacttactattgctcaaggtgctcacgttgttactaatgaattctacaacaacttcattaacttaactggttctggtattactattggtttaattatcttcactttagttgctgctaaatcagttcaattgaagtcaattggtaagttagaattagtacctggtatcttcaacattaacgaaccattcctcttcggtttgccaatcgttatgaacccaatgcttgctgtacctttcttcttaactccattagtagttgctgcttcaacttacttggttatcaaaactggtattgttccaccacttaatggtgttgccgctccatggactacaccagctgttatctctggtttcttaattggtggctggaagatggccatctggcaggcatgtacgttacttatttcaacagctatttactggccatttgctagaaaatacgataaggtattgctcgctaaagaaatgaaagaagctaaacaagaagcaaataagtaaaaatatgctaatcatatgaaattaaatatagttttagaaagagagatgccattaatgcttgtaaaatagtaaaaatgacgtctcttttttgataaagtatagacttttgttttaaaatagaagtataaaagtaaagaagatgaaaaaacatggcaaaggcaaaatatttagaggtcgcaagtgaattaaaaaaacgtattgaaaatggtgtttacagtaagcaagagcccttacctgatcaagaggcattcgctaaagaatttgacgttagtcgtctgactgtaaaaaaggctttcgatggtttggagcgacaaggactagtttataaacaatctggcttaggaacatttgtcgcaggcgaagttccaattaaatctgatattgattctcccgtcaatgcttttactggtttaagaaacttactaggaaaaaacgaagttacaagtaaggtgctacacttctctgttgagtttcccgatgagcaaatacaaaagaacctcgatctaaagcgaaatgaaccagtctataacattgttcgacttagaatctatgatgatcaaccctacattattgagcatacttatatgccaattaagctggttcccgaattagatgagaagattctacatgcatcaatctataattacatccatcaaaaattgcatttaaagtttggtcatgcttatcgaaaaattcgtgctgctaaacccaacgaatacgataaaaaattcttagatgctaaagatgatgacccaatgcttgagctagaacagattatttggcttactaatggccaacctgtcgaatattctgtcagtaagaatcgttacgatacccgcgattacgttttattagataataaccgattttaggaggtattttatggcattctcaaaaaatttcacttggggtggcgctactgcagctaaccaatatgaaggtggttatgatgaaggcggcaagggtttaaatgctgttgacgttttaactaatggctcagcaactgaaccgcgtaaggtaacttggaaaaagcctaatggtgaaactggagctacgcctctagtttgggggcaagaatttagtctacctgaaggtgctgttccaactattttagacggttactactaccctagccaccaaggaacggacttttatcaccactatcaagaagatattaaattaatggccgacatgggctttgatgttttcaggctatcaatgaactggtccagaattttgccaaatggtgatgacgaacaacctaatgaagacggattagccttttacgataaagtatttgatgaatgtgctaagtatggcattgaaccactggtaactttatcccactatgagacacctctttctttaattacccgctacggtggctggaaagatcgccatttaatcgatgctttcgttcactactctgatatcgtgatgaagcactacaaaggcaaagttagatattggcttacttttaacgaaatcaacgccatggacatggctccttatatgggtggcggtttaatcgatggtagcgaacaaaatcgtgctcaaggtgctcacaatcaattcgtagctagcgctaaggtagttaaattagcccatgaaattgaccccaacaaccgtgttggccaaatgctagcttattctgcctactacccttacacttgtgatcctgctgatcaacttaaagtgatggaagccaagcaagagatgctcttctacagtgatgttcaaactggcggccgctaccctaactatcgtcttaagaaatatgaacgtgatgggattaagctgaatgatacaccagaagattatgaattaatcgctaaatatccagcagatttcttaagtttttcttgctatacttcaaacgttttaaccactcatgaagctgatgctaaagctaacggtaatgtttctgctggtggtgtagttaacccatatcttgagagtaatgcttggggctgggcaactgatccagatgttttacgaatcggcctaaatgagctctgggatcgttaccacaagcctctatgggtagtagaaaatggtttaggttctgctgacacccttgaaaaagatggatcaattcatgataactatcgtattgattacttacgagaccagatcaaatcaatgcgggatgctgtcacaattgatggtgtcgatttgatgggatacactacctggtcagcaatcgatcttgtctcaaatgggactggtgagatgaagaaacgctatggttttgtctatattgatcgtgatgaccgtggcaatggctcactcaagcgttatcctaaagattcattctactggtataaaaaagttatcacctcaaatggtgaggatttagactaaaacttttatttataaatagagcctagctaaaaagtgctagactctatttttctaaaaagatatgatgaaagcataagtaatatagatgagagaaggaaaagtatgattacaattactaaacaattcaacttcaaggctaaggacttctttgattaccttgaagaacaattaattcctgctattaaaaaagctcgtggtaatgacatgccggtaacgcttgctaaaggtactaaatacgaggtggatggtgcccaagtagaattaaccgattacgaaagaaacaaggtctatggggctcattttaagacagatcgaatggaattagtgattaaatatgtcactgaggataacgatcaaggcgtaaaaatcaccttttctgaagacatgcttagctttgaccgcgagaaacacggcaaactccaaactatgttttacaatttccaattaaagatgggcgcaaagaaagaattaagacgaatgggtgacaatgttttagctaatattgcagcttaaaatcgccatctcagcagcaaaaagaccataactacttctaattgtgttgtagttatggtcttttttttgttcaaattaacaatcttatctatatcaaaattaatctattagttcttagtagcgtcagcctgttccttcttcaataagacattgtcatagtgcttgatgaatgggaaccaaactaagaaagcaacaagtgcacaaacaattgaaagcacggcaccttgccagctagtagttgcaagataaccactcaaacccactggagttggccatggttgttgcacaataatcttaggtactaaatgtgaagttactgcgatgtaacccaccaagccagaagcaagtggagcacaaatgaatggcacaagcaagttaatgttataaacgattggcaaaccgaataacaatggttcattaatattaaaaatggcaggaaccaattcaaccttaccaatttctttcaattgagctgaacgagaaccaaaggctaaccagattgccatccctaaagtagcacctgaaccaccaataattacaaaggagttcatcggatcacctgcaaagaagtgattagcaccatttacattagcagccatattagctaaaacaattggagtatagaatgagctcatgatagtagcaccatgaattccgaaccaccataagaagtgaatcaagaaaatgataatcaaaaagccccaccaagtatcagcaattgcactgatgaatgagaatggaatgtaaagaacttggaaaatatcagttcctaaagttaccaaaattagttcaatcaatgcaactacaacagcaatacaaaagcctgggatcaaagcgctaaatgagttagaaacaccagatggaactgatgcaggcatttttattctccagttgtgcttaacagtgtaacggtagatctgaactgtaagccatgcaattactaatccagtgaagataccaacggcagcaattctggtaataccatttgttgaggcttcataaccgcctgccaccattttagtcttagtaaatgtagtaataaattgaacagcaccatttttccaaataagttccagaacagtaatgaagaatgccattaagaacatcatcaaaccgttcatcggtaccaaatcaattttctcttctcttcgataaatatccgtgtatgaataagcaaaagtacctgcaaatactaatgccaagatacccatagtcgagttgtaaactacttggaataagccactaaagcggcctaaagtattcgcataaaatgcggcaaatcctggaattggaaatgcttgaggcagcacattcaaaattaagaaaactgccccgataattgaaaatgaaataacgctataaccagcgtccataatagctctaacaaaacgtgaacctgcaaatttacctgcttttgcagctagcgcatctttaaaagagccagattttgaatcagccatatttctttcccccaatattctgaaacatcattaaatctgaacagccttattatagcgaaagcgttttctaatgtaaacgtttttattgatatacgatatattttggttttttaaaatgtatatttttgaaattacttctaataaaaaaagttcatgtaactttacatgaactattgttggtgcttcttaaaagtctctatcaccttgtgataacgatcttgatcattcataatttgatgaattcggtattcgctccaaacacacaataaaatgccagctaaaaacaaagttgtcataaagaacataatactttgattttcgatgaatgggaataaatacttacccaatggcaaaaacgtcaatattataaaaagcaaatttaaagctgcttgtacttcaagataaactctgctaattgggacctctcgttttcgattatgcattttagttaactgctcaatcgaagcaatcccactataaattgtcataattgccgaaacaataatgccaagaacactatgataatttacatcaataattagccacatcaagttggtaaaaaagaagatagtaataatatatctaattaacttaaacttcccacactaaataagccagtaatctcttgatcttgcttggctttaggcttctatattatttttgctagttttctttaacaatttttgcatgtatttgggtaaacgattgataaagtcagccgtgaattcagctatttgtgcttcactggcatgaaagacttgctttacgctggccagcattgcatcagtaatcaattgcaaggaatggctaaaagtaatgtccgccagctcatcaatcatgcaatagaacagctcgcctagcgtgcgttcatcttcatcgtcccgcttggcaactgacataagcatgtagcgagtaaaaactatggcaacatgagcggtcaaagcatcgtaagacaggccatgatattccgtacttagttttagataacttttgcaagttttgaaaaaaacctcaatatcccaacgcttgccgtagttgcggataatttcatcttcgctaagcgacatgtcggtacaaatgattgccagccaatccttgcgattggcacggtttctaacgcagacaatccgtgcatctattttagcaccgtctttgtcctggcgtccgactttgactgggattgacagcaggtagcgagaacggccgcatcgctttttacagctgcgataaatctgtttgatgtttttgcgttctccctcaaattcatatttgattttggagctaaccttaaccatggcaatcacatccagcttcctttgcttgagctggacgatttgatgtggatttgagaaccagctgtcaaacagcacgtacttggcttgatgacctgctttcatagcttggtcgattaaattaaccatcacgtctgtgcctttagtccgggcaagcatacgtctttggccagcaatggtgcactgatcaaaaactttattttcgccaatcatattctgtagcttctgagaagacagtagcactgaattgattggcatgaaagaagctccatcagtccagcccagggtcatcatgcgaaaacctttcttgtaagtcattgatacatggtcaaaaactttggcgactaattctgttttcttgaagccggtcctagagaagtaggaatcatcgacaacaaagcaatcagcccgtttttctgaagtcaaagatcgcaagtggttattaatgatttgcgcagacagaagtgtggtgaagtggagccaattgacgtgaacgttgcgcataaaacggtaatatgagttcttggaaaaattttcttgaaaatgatccattttcagctgcatatataagctgcggtcacgaaagacattgcttaaaacgtaaagaaacaagctgaacaggctaatgcctttttccttgcggaagccacattttctcaacagcttgatcacctgaaacttcttgatgaagctgatgattgagttggaaaatagttgttcattttgttggtcaggagatggtaaaatagacattggcacaagcctttcatgcaaataaattatgttttggtcaatataattatagcaatgaaaaggacttgtgccttttatatttgtcaaaacacgcagaatcacaatgaaacaagcaattttgcgtgtgggaagtttaagtaattaacaaatatcgactaaaatacatatacttaatgctatcttcatgtcttttcttagccgtctctgtctgttcttttttaatgttttgtttattcatttttcttcgtctcatttcttgcctaataattatatttaagcacaaatcaggcaaaaattatcgaaaaaaataactcccgcattcgcaggagttattttcattttcaacgattacttatcttcttttttaagagagccagattcatacagcttttcgtaaagatcaaccatttctccagctaaatctctaaaagtgatagcattcatcaagtgatcttgagagtgaactaccaacaaagttacatgcatgtggtcgccttgagcttctttagttaacatgccggtttgtgaattgtgagcttcaagaagtgatttgtcactttccttcaacttttcacgagcacctgcaatattgccttttttagccaagcgaattgcttcaaaggctaaactctttgcattaccaccattggcaattaaacccatagcagccattaaagtttcttgttctttttgttctggagttttcttttcttctgccataaaatctgtctcactttccttagctattttagctaattaattattcacctttgatcaatttttcagcttgtgccaaaacgttagcaccattcatcatgccgtaatcttgcatattaattacgtctaaaggaatgtccttaccgtctttacccttacctttaaccttgttttcgaagtcacccttcatgtaacttacttgaggcccaagaagtacacaatcgatttcttgttgtgccatcttgtcatcagcttctgatgctgggcaagcaaagatttctgcatcaataccttgttccttagcagcagcttgcatcttagttactaagagtgaagtactcataccagcactacaatttaacatgatagtttgttcagccataataaatttcctcctgaaatttttattttatagtttaattagcttttattgatctacaccaattattataaaacgctttcattgatttgtaaacaaaaaatcatacatgcacggcttagtcttaccatgcttatataatcatctcaagcaaaagatatatacttttatctcctgacagccaatattatataccctttgtaagcatttttaaatacatatcctcagcatgttaagcaaagtcctttgcatacgtatgctttaacataaaaaataaattatttttagcaaacgctttcaattaataaatgaatactgttagaatgtatatgtaatttattcctttacaatagaaaggaggcagaatcttgagtcgctatcaagacattgccaatgatatagaaaaagatattattgagaaaaaatatacaagaaaactacctgaacaatttgaactggcccaaaaatatcaaactagtcgggtcacaatcgttcacgccttaaagattttacaaaataaaaaattaatacggactgtcaagggacatgggacctttattacaagcaagtctattcccgacatttttcttaattctgatgtcaatgagcataccggctttactcgtcatgtcaataatgctctcgcaataaccagtaatgtgattgcctttaacattcgcaaacctagtattagtgaacgaaaagctctttgtttagaaaaagatgacgaagtttacgatattattagacaacgaattttaaataaaaagccagctaaattagaatataccgtgatgccagttagccgcatccccggtatcaccctagatattttgcacaagtcaatctactcttatattcaaaatgatcttgggcttaagatcggccgagcagatcgcattattacagctgaaaaatctgatgcatatgatatgaagtatcttgaatgtaaaaatgatgatcctgttttatgtattcagcaaaaggcattccttaaagacggacgaccttttgaaatttctgagtcacgtaatcgctatgaccgtggtgatttaacagttaatggcaaataagtgttacttgattaaaaaaatcaattatggcaaaatggctctcgtaagcgtttccaattacatacaagaaagtgaggaaaaatttaatgtattcagcaaaaatgcctaaaaactttttatggggtggtgcagttgctgcccaccaacttgaaggtgcttggaaagaaggaggaaaaggtacttctgttgctgatgtaatgaccgttggttcagctactaaaccacgtgaaattactgacggtgttcttgaaggcaagaattatcctaatcattcagccattgatttttatcatcactacaaagaagacattaaattaatggctgaaatgggcttcaaggcttttagaacttcaattgcctggacaagaatctttcctaatggtgatgaagccgaacctaacgaggaaggtttaaagttctatgacgatttatttgatacttgtcatgaatacggcattgaacccgttattaccctctcccactttgaaatgccttttaatttagctaaaaactatggtggttttaccaaccgaaaagtaatcgatttcttcgttcgttttgcagaagtttgcttcaaacgctacaagaataaagttaagtactggatgacctttaacgaaattgataatcagtctgcattcaataatgatttcttgatggctactaactcaggcattttgttcaaagatggcatgactgacagagataaagaagccgccatgtatcaagcaggtcactatgaattggttgcttcagccttagctgttaagattggtcacaagattaatcctgatttcccaatcggttgtatgattaactactcacctgtacgtccgctcactccatcaagtgatgatgtccttttagctgataaatgggagcaacgccgtgactggttctcagatgtacatgtttttggtgaatatccaaatgcagttgaatcctacattgaacgaaatggctatcgtcctgatataactgatgaagataaaattgtcctaaaggaaggcaccgttgactacgttggcttctcctactatcagactactaccgtttctagcgaaaaagttaaacctgatgaattaactgatttggctaaagctgttgctaagaatccaaccttaaagcgtagcgattggggctgggaaattgacccagaaggcttaagaattgcattaaatcaattgcaagaccgttatcacaaaccattattcatcgttgaaaatggtcttggagcttacgataaagttgaaactgatgggtcaattcacgatgactacagaattgactacttaagaaaccatatttcagaaatggaaaaggcagttgaactcgatggagttaacttaatgggctacttaccatggggctgtattgaccttgtttctgcaggtactggtcaaatggataagcgctacggctttatctacgttgataaaaacgatgctggtgaaggtacattggctcgttcacgtaaggactcattcttctggtacaagaaagttatcgaatctaacggtcaagacttagattaattaaactattaatagcaaaaaactgatattcagactttaatcattgaatatcagttttttattttataaatatttactgccttctttaatactcaatttagctaaatgctctcgatgcagttcaatgaagttacgcacccaatctggattggtcttagagtaatcacgcaaagcccagccaattgccttgttgataaaaaactcctgactatcaagattattttcaataattttttgtaataacgcggtgttcatcttctttttacgcaataattgatgctcaatcgcgacccttcttacccagaaatctggatcttgcgaccacttgagcattagatcgtctactcgattatccgttaagccaacatagccataaattttgattaatgagtcaatcgtatcccaccattgctttgttctaacaaaacgctcaattttagctaaatcatcaaaaacaatatactttttcattgccaataaataatcacaggcaaaatattgcaattcgcgttgttcttcatcccatgcctggtctagcaacttccagtcaacttcttttttcttcttttcatctttcaaaaaattatgataaatcgccctacgttctggtgtttgtaggccatagaatagaaattgattttgcatgtaaccaacaagatgattggccttttcttcatttgcccgagcgctaaattctttttttaatgtttcaatattcatgttttttattttagcacaaaaagaggtctccaaattctagagacgcttatcgtaaaaataatcatctacccgatcatttcaactaaaagcttggtagaataaaagtatctatattaagaaaggcataaacaatgaaacaaatttattttaaccatgatggtaatatcgatgatttagtatcttatctgctcttactacaagcaccagatatcaaacttttaggtgttggtgcaattgatgcagacggctacattgatcctagtgttgaagcatgtcgcaaaatgaccgatctttttaacttacgtggtgatgatttgactattgctcgttccaactcacgtgcagtcaaccaatttcctcacgagtggcggatggcaacttattcatttaattatcttcccatgctcaatgaaagtggcaagattaatacgcagaaggcaaaacttcctgctcatttagacatggtcgaaaaaattaaagaagcagacgagcctatcgctttagttatgacaggtccgttaactgacctggctcgcgctttagatgtcgatcccgacattgagaaaaacattgaaaaactttattggatgggtggttctcttgatgggcacggcaacgttgctatggttaacgctgacggtagtcaagaatggaactcgttttgggatccatacgcagttaaacgcgtatttgaatcaaatattccaattcagatggtgggattagaaagtacggaagaattaccacttaacgatgagttgcgtcagcactgggcaagtttacgtaaatatcctgcaatggacttgataggacaaggctatagtctaatcgtatctataccatcagccgaactctacctttgggatgtgctaactacaatcagcgcactatatccagaagttgttgaaaccgaaacggctaaagcaagagtcatcactgatgggttaagtgcaggaagctttgtacgggatcctaaaggaagagaagtaactcttgttactaaagccaataaggatctcttcttccaaaagatggatgaaattttagaaagaaaataacaaaaaagaggctcacgcctcttttttatattgccttaattgactttttgtaaagaattaccgcaatccaaactgaaatgaatgatggcagtatcgcaactacaaacaaatttggatctaaaaaattacctactctgatgaagtttgtaattgaagtaatatgttttatgttactaaatatcgcttgataaactgtaacatatattaacgaccactgaatataatattctaccaaagtgagtgtagttgtcgaaaacttaaaaattttgctagccagtcgcatcccccaataaacaaaaacacctgaaagtacaacaaatgctgctaacagcaaaaacaagtttcccaaattaacatggtcccattgactcatgatcaaatacgcaattaccatgaaaattaagaaattaattgttgaacaacacagctgaatgacaaataaaattgcagcctttaagaattcaaacttgtgctctgatctgaataacaaaaatactactagaataattacagcaatgatgaaatatgtagtaacgtgcacagttatctcctactttgcctgttttaaggcttcgcttgtagcctctttaaccccattggaagtaaatgttgcaccagtaacagcatcgatatgagcagattgtttatccaaaatttcctgctttaatgttttttctgctttttgaccatactgcggcgtttccgtagataaatctaaatctacagttgaaattttattatcagctacagttaatgtcacacctacaaagcctgccatgccgcgtgcacgggcactatatgttccttcttttaacatcctttttcctcttttttataaaacaaaaatactgctatataataaatataacagtattcctaaaaaaagccacaaagatattgtgtttagtatatcatattgatatactatttcttgggtcttgattgtttttataagtccttattatgacccatgtgcaggtagtagaatccccttctacctgttttattataccacaataaataactgatgttatatcaaatcttaagttcttttgaaaattttctcaaaagggcttttcttgcactatcctttataagttacgttaaaattgaaatggaattataaagttatatttaaagaaggtaaagcatgtatccagataataatattcttacatatttaaaatggcgtggtgacgttgacttctcaacatcgccttttaatgatattgatgcacttgttttatctattttttcttatcttgaattaccaggtattgttaaaagtaacggaacgacaattagtttagaaaaggctgccaagctctattttgcagatgatcatcctcgttatgataatttgcaataccaagaactatttaaattaatggctcatgcagaccgctttaaaaatgcaaaactgtcgtattttattagtacgttaactgaacatactcaatttagtgcaatcaaaattgaactaactgatgggaccaactttattgcttttcgtgggactgacgattcactaattggctggaaagaagattttgaaattagttttaaaatcactgtagcccaacaacaagcagtaaaattgctcgaaactattctcaaagctgatgatcaagattattacttaggcggtcactcaaaaggtggcaatttagctgaatatgctgccattaatattgagcccaaattaagaaaaagaatcaaacgtatttatacctttgattcacctggaattgcagaagaaattggtgctcagctccctaataagtatttgcaaaatactctacgccgctttgtgccagactttagcgtcatcggtcgcttattggagtcgaaaaatattccagccactattgttgatagtactcgcaagggactaagccaacacgatgctttttcctggcaaataatcggttctaacttcgacaccagacgccaccgcaatgctcaatctcaagtatataatcaactaatcaatcaatggattggtaacgccaccctagaagaacgtgagtctttaactaatgacctcttctctgctttaagctctagcggcgcaactaagatcaacgaacttgataaaaatggttttggcggttttggtgcaattttgttttcactggctgattcatctcggcgaacccgtttcgtctttggttcattattttccagcatttggcagacgatcaagagccagcaactgaccaaagcgcttttctcaacagacacaattgttggttgggtgctggtagtattaggaatcattagtctaactctaccccaatatgcagtgcgcgcttttggcgccctagttgccttcacggggattggtttcagtgttcaccaaattttaacaacggcaaaatctagtctaaaagaccgacaaaaaaacttctttattatttcgtatttagtagtttttgctttatcaaccgcgttaatttctaataaccgtctactaattttcttagctcactacttcttaggactattcttaattatctattcctacattcgaattaggcaactagtctttcgtaaattacccggaatttttcagattactattgtagcgatcgaggcattaattgcttttgctttaggaattatcgtagtggttaaccctagtgcctttaatcggagagcaattattattatcggtattttgctaattgcttacggcttcttcaagttagttggcgaattatttggccagcgcagcaaaatgcccaaaaatcatcgttaaaaaaagcttgttaacttcaatatcagttaacaagcttttttcttagcccttaataaaggtattagcctttatatgctttaaaatgttatacccgattgcacgaatatgatttttactaccataagtttgattcaaaaacattacaattccattctgattatcagtagtcagttgcatccagttaacaaagtgggtatcaccaaaattgccataagcgacttttaaagtttgattctttttcagataaaaaccacctgagtaagtattaaccttagaacttaaatgaccaagataatggaactgttttttagtcagaatcttgccattttgcataccagattggattttataataatcattagccgttgaaaatagattcccagcaccaggcaattgagaaacaacattacgattagcataggcactagcactgtaatttttaccaccagaataaagatatgaaatcgcatcagtctttgaccgcggaatttgttgataaatatcggtttgcttcaacttcaatgatcgaataacccgctgtttcacattagcagcataagactttcccgttactttactgataatgcctgccagcaaaacatagttagcattattgtaattaaatttactgcgtcccgtattttctcgtgcattggcttgggcaattgtccaattgatcgcgccattttcagaaaaattaactccatgattagattctgttccaattacgttaattcctgaggtatgtgtcattaactgccccaccgtaatttggtttgcatgcttcaaatttggataccagcgtgaaatcttagtattctgattgaatttcttctggtagattaactgtgtaattattgcagcagtaaccatcttttgcaaagaaccaactggataaagcaattttgtattgccatttttcagtcgtttgctgtaataaccgtagcctaagctaacacgttgagcatgcccattttttacaatttcaatgcttcctcgtaaatgatgctttttcatcatcttaagcgtatattgccgtagttgcttatttgaataactcttcgcctgcacagcatgatttgacattatcaaacacgatgaacaaaataaaatgaaagctatcccgaacttttttagtgtcttcaaaatttcaatctccttttaatcctgaactattctaccacaatcaaaaagcgcaaaatcacttttaatcatggtttgcgctttcatttttattttttaaaatttttatagtaagttcatcttaactaggtattccgcattttcaaccgtattccatgcagcacccttaagcaaattatcggctacaatccacatgttgaaggcacccttattttcataatcagggcgaatgcggccaacaaaagtttctcgcttacctgttgcattaattggttgcggataaatttgatgtttaatatcatcttccaaaacattacctggaaaggcagcaactgcatctttaatatcttgtgccgttgcagtctcatcttcaagagtaaagtagacactttccccatgagaaattggcacaggaaccctaacacaagttgcagttaccttgatatctttggcattcatgtcatttagcatgatcttctttgtttcatgaatcatcttccattcttcatgagaatagccactatcttctaaaacatcaatttgaggtaacaaattaaaggctaatgggtaatgctttttgtctcctttagtaggtaaaatatgagcgtctgcttgcatgtctttaccatcaaggtagtcttgactttccttttttaattcatcaattgctgcttgtcctgctcctgaagcagcttgataagtggaaacgataatttgtttcaaaccaaattttcttcgaactggttccaaagccattaccatttgaattgttgaacaatttggattggcaatgatgccgtgatgctttttcaatgcttctggattaacttcaggtacaaccagtggtacatctggttccattctaaatgctgatgtattatcaacacagacagcaccacgcttaacggcttccggcagaaacttctttgacactgcaccaccagctgaggaaagtactaaatctacaccatcaaatgattctggtgtagtttcttcaactttcaaatcttgatccttaaattttaaaactgtacctgctgaacgtgaggatgcgagtagctttaagcttttaactggaatcgttgattgttccaattgttcgatcattcttcttcccacggcaccagtagcacctagaattgcaacattatattctttcaccattatttttctcctcgcaaaaaattcttcattctttccatcgcttcatgtagattttcatcactggaagcatatgacattctaacgtacccttctccaccaggaccaaaagcactacctggagtaataccgacttttgcttcaaatgctaaatccagtgcaaattgcatatcatttttaccatatttagctggaatcttagcgaaaatataaaatgctccctgtggtctaactgcttgcatccccatcttagctaattcatccaacacaaaatcgcgccttctttgatatattttgcggtatttttctggatcatccaatccatgctccaaagcttcagtcgctgcagcttgagaagagtcagttgtagtcgtaaccattaaaccatggactttaccaatttgttccataatttttgccggaccagctacataacccagtcggtatcctgtcattgcatgtgacttagataatccagaaatataaattgcccgttcaggaatcacacttgcaattgaaaaatgcttaacgccataagttaaagtactgtaaatttcatcagtaattacgtacagattgtgtgcttttatcacttcagctaatgccctaatttcgctttcggtggattcaactcctgtcggattaactgggtagtttaagataaccgccttgatattagattcttccttaagtgtactttctaatctttctggcgttaatttaaagttatcttctgacgtgttcattaatacataatctgcatctgctaaagttgcaactggccaatatagtgaaaataccggtgtaggaatagcaaccttatcaccccgattggtaattgaaaatagtgtcgcattaattgcttcagttgcgccaactgtaaccacaatttcagtttctggatcgtaaactactccacttgcttttttcaaataattgctaattgcttgcctaagttccaattttcccttttgtggcgcatagtgtgaatcattatttcgaatactttcaattgcagctgttttaacatgctcaggtgtattcatatcaggctcacccaaagtcagcttgataattccaggaatggttgaaactttattatcaaaaatcctaatccccgaagccttaacagattgaatcttcttacttaaagctaagtcatttgctaattctggcataatttttcctcttataaaatattctctaagccaataactagttcagttaattgatctactttttctaaagcaactttaaccccactcataaaggaatcacgatcaaatgaatcctgtctaatggttaaagcttcgccaggtccaccaaataaaacttgctcatgtgcaatatagccaggtaagcgtactgaatggattttaattccttgataatctccaccgcgaacattggctaaagtctcagtttcatcaggcgcagtttgatgttcaggacgattttgcgcgatcatttttgcagtagctaaagcagtgcctgaaggtgcatcttttttatctgcatgatgcatttcaataatttcaacatcagggaaatacttagcagcttcttcagcaaacttcattaataaaactgccgacattccaaaattaggtgcgattaagccacctaatttttcctttttggctagttcaatcaaagttgcttcttgatcatcactcaagccagtagttcccacaataggtttaatttgatgcgttaaagcaaaataaacattgtcatagacagctgcgggagtagtaaaatcaatccaaatatctgcagcatggtcaggaatttgacttaattggttaaaaatttgggctgttttaggtaaatgatatctttcaggctcatttactgcctttggagcaaatccagccaccaattcaaaattgggcagctgattaactaaactaacagccttttgccccattgcgccagtaaacccagctattagtacttttttaggcatctcgtcttaccaatcctttcctaaattaagtggcaacttttgcatcaatgcattagcatttaaacctaaatgctgggccaacttttctttttcctcatcacctaaagcgactaatggcaaacgacatccccctactataaatccttgagcattcaaggctgccttaacaggagctggtgaaggatacataaacaaagcctgcattttcggcgttaaccagcgttgaatcgtgcccgcttcaggataatttccttcataaagatcatcaaacattcgccgcatttgtttgcaatataaatggctagctacggaaataacgccattggctcctagtaatcttgcaggtaacgcttgcgtatcttcaccactaaataccaaaaaattaggatctttatgatcaataatgtattccatttcttctaaagatgcacattgtttgattcccttaatatttttaaggcgtgataattggactaccgtttctttttccatttttacgccagttctaccgggaatgttataaatcataattggcattttagtctgagcattaacagcactaaaatgtgcaatcatgctacgctgatcaggcttattgtacggtggcactactactaaggcataatcaattcctttaatctgtgctacctcattggtgaaggcgatagtggttgcagtgtcgttactgcccgttcctgcaataaccggaacacgtccattaacaatttgaccaaaatgctggtacaagtctatcttttcatcatgagtcagagttggcgtttctccggtcgtaccaccaactacaaagccattgcaaccttggtcaattaaataattaaccagcttttctaaactggcaaaatctattttttgattctcatcaaatggcgtaacaatcgccgttaacaaatctgcatcaattaatgttgccattttattgcctcattctattaatcaaaaatcctttgattgcatcaacgccgcgctgaatgcttttctcatcaggattaagtgtagccgtatgcaattgtgaatcaggattaccaacacctagccaaaacattgttccagggaatttagccagcaaaaagccaaaatcttcacccgtcatttttggttcagtagtaataaagttaaccgtcggctggcttttcatatatgaaataaagttcttggttaattgtgggttattttctactggccaatatccaccttgattcaagtctaacttcacttctacaccaaagcttttctcaataccaagacagatttctttgagacgttgatcgattgtcaaaatcatattttgagttaagccacgaatcgtgccctcaattctagcttgaccagcaattacatttctaatcgtaccagcttcgattttgcctagagtaataacaccactttgaattggatctatgcttcgtgaaataatagtttgaacctgcatgatcaaacttgctgctgcaactaccgtatcatttgcatcttgcggaaaagctgcgtgtccacttttacctagaatatcaatattgacttcagttgtaccagcaaaaagtgtacccatccgacacccaatgctaccagcaggcaaagcggggttatcatgcaagccatagaactcgtcaggtttaaattgatcatgaaaaattcttttttcataagcttgcatcccaccactttggctttcctcggctggctgaaagaaaaaaagcaaattatcttgtggctgattttcactaaaatagcttaacaaacctaatgccacggtcatatgaatatcatgtccacatgcatgcattactccctcatgttttgatgaaaatgccagtccagttttttcagtaactggtaaagcatcgatatcagcacgatatcctatcgttctgtgtggttttcttcctttaactaatactagaattgcggtaggcagtgtcgacggtatctcaacttccaaataatcttgcttaaatttttgaattacctcgattaaataatcatgtgtttctttttctgctagtgctaattcaggtatttgatgtaaatgccttctaatttgaattaactcactttcacttaaaactgacattttataactttctcagattatcttctagttccgtcttactactagttttttcatcaacttttttaataattttagcaggaacgcccgctaccatcgtatgtgctggcacatcatgagtaactactgctccggctgcaataacggctccttcacctacatgaacaccctcaatcacaacagcattagccccaatcatgacattatcatcaatttgaaccggtttagctgaagcaggctcaattacaccagccaatacgctaccagctccaatatgacaatgttgtccaacaatggcacggccaccgagaactacgcccatatcaatcatggtattagccccgatttctgctccaatattaataatggcacccatcataattactgcattattaccgattaccacttgatcacgaataatagctcctggttcaattcgagcattaacttttttgaagtccaataaaggaactgctgaatttcgtgcatcattttcaatatggtaggccgtaatttgatgattttcttttaaaaatggttcaatatctttccagtcaccaaagatcgcgccagaatgagcttcagtaaaattctcaatttcctttggaaaatcaatttgtgctaaatctcctttaataaagacttttaccggtgtcttttttggtgcattaccaatgtaatcaataatactttttgcatctaactttgccatcttttttctcttttctaatttaaatatgattgatctaaatgaaccaagtcttctaaactttcacgcttaatgactaattttgccttaccattttctgcaaataccactgctggtcgaggattacgattataatttgaagccattgaatacccatatgcacctgtatccaacatcgctaacaagtctccagctttgacttgtggcaaagcttgatcttctgctaatatatcgccactctcgcaatacttaccagcaatacgaacatgttcagtcaaaggcgcttgtggatcggtggctaaaactgtttcatacttagcctgataaagtgcagggcgaatattatctcccatcccgccatcgacagtaatataagaacgataacctggaatatccttacggctacccaccgtataaaggttgtaaccggctggaccaacaattgatcttcccggttcaatatcgatttcaggtaaaggataattcattttttcagcttcagttttgatcaccttaacaatcgtcttaacaaattcttctggtcgtaatggatgatcttcttgggtatatttaatcccaaaaccgccaccaacattaataacttgtgcaagatagccatacttttctcgccaatcttgcgctactaccattaatttttgtgctcccatttcaaagccgtttaaggcaaaaatctgtgagccaatgtgagcatgaatccccaacattttcatcctaggattagctagaacttgttttaatgccttttctgcttgacctgattcaagatcaaagccaaatttactatcaatctgacctgtttgatcatattcatgggtatgtgctgaaatccctggtgcaatacgcaacatgacactaatcgtagcatcgtacttttttaaaacttgcgccaataactgaatctcatgaaaattatcaataataattttgccaacatgattttttacagccatttccaattcagttaatgatttattattaccatgaaagctaactctctccattggaaaattggcttttattgcagtaaataactcacctgctgaaactacgtcagtgtatgctccctcttctgcaataacttgatacattgcgattgctgcgaaagctttacttgcataactaacagcataggccatgttttcttcttcaaaaactttcttaaaagcccgaatttgtcgacgaatttgatcgacatcataaactactaatggcgtaccatacttttgagctaattctactatatcaactccaccaatcgttaaatggccttgctcattaatctgatctactgcaatttgtgaattcattttgttctcctgtctttttcaggcgaaacgctaataaaaaatccattgtctgcgccaaacaaacaatggattaatttctacttaatctatggtcgatagcgctccgcgaattttgttcgcgacagtccgcagtttattcaactacgccccagctcaagcctttagcatgactcagcttcggcaacctccccttttacaattcatcttcgttttgcccaactcagaattgttacttatgtcggctgcgcctcttcgattgactgtagtttacaattttataaaaacatagtcaacaaatttattataaaaatttaattttatttgtaacaatgcggcatttagagtgataaattacagtcatcacttgcaagattaaaaaataatgttagaattcaattaaatttagtctgacttttttatttaaattaatgatttctgaaaacaaaaggagttttgaaatgaaaatcgtaaagtttggtggctcttctttagctaccggtgaaagtgttgcacaagcaattcaaattattctcagcgatcctcaacgacaagtaatggttgtctctgccccaggcaaaaggaatacaacagatatcaaagttactgatctgttaatcaagtacgcagatttagccttaaagcacaagaattgtgttgaaatcgtgaataaaatttttagtcgctatcaagaaattggtcattattttggcttagctgatacggaattaagtattattaaacaaattttattagagttgcccaatcagggttatcctaacgaaaaatatcttttagctgcatttaaggcacatggtgaacggcttaatgctcgtttaattactttaattttacgccatcaaggaattaatagtcgttttcttgatccggctgaagccggtttaatcgtgactggcgagcccaatgatgccattgtcaatccagagagctacttaaatcttgaccaaattaaaattaaggctgatgaacgtatcgtatttcctggcttttttggcatgactccgtctggtaatatcgccactttttcccgtggcgggtcagacattaccggggctattctagctcgcggctttcatgctgatctctatgaaaattttacagatgtcaatgggatttttgccgctaatcctcatattattgagcatccccaatccatcaagaaaatgacttatcgcgaaatgcgagagttgtcatatgctggcttttctgtttttcacgatgaagcattgattcctgctattcaaggacagattcctatcaatgtgaaaaatactcatgatcctagcaatcctggcactatgattgtcccagaaaaggattttgtcccagataatgcaataaccggcgtaaccagccaaaaacatttttccgcattatatttgcataaatatttgctcaataaagaagctggtttcaccttacgtatattacaaattttataccaacataatattccatatgagcatatgccatctgggattgacgatattaccattatttttaacaatgattttctaaacgatcagttaattgatcaaatttgtaatgaaattcaagctacaattaatccagatcaactcgaatggattgaagattatgcaattattatggttgtcggcgaaggaatgcgacaaaaacataccatcagccgtcaaattatcgattctttaggcgatcatgatatttcaccacaaatgatcaatcagggagcttctcaaatttcaatcatgatcggtactaaaaaagaaaaggctgatgaagcagtaaaaattatttatcaaaagttttttaattagggggcattatgattaatttattcaaagttcacggttcgcaaaatcatttctttattcttgatcaaacacaattcgaacacgaattaagtgacgccgagctaaaaaattttacgcaaaagattaccaatccacaaactggactgcttcacggagcagatggcgttttagtagttaatcatcccgtgcattctaactcacttggccagatgcgtgtaatcaatgctgatggaagtgaagcatcaatgtgtggcaacggtctacgcaccgttgctcgttacctaagtgaaaaaacgggaaaagataatttcctagttgacacaatgaatgccagcttacgtgttagaagagaaaaagattttgcttctaacgtgccagcatttgcagttgagatctctcctgtacgctttaataaagaggcactcccttttgataatttaggacaagaacggattattgatgcttggttgccagaaatttatcctggattacgttttacttcaattgccgtacctaacccacatttaatttcttttgttaatcaagcagaaattaccggcccgatcttaggcattgttggtaaaaaattaaatagcaataatccctactttacagatggcgtcaatgttaatttcgcgcaaattttagataaaaataaactttttgtccgcacttacgaacggggcgttggttttaccaatgcctgtggtactggaatgtccgcgacttctcttgctcttactttaacccaccccgaaataggcaacttaaatacaccaatatcagtttataatcctggcggtatggttaaaactatcgtgcattatgaaaaaaatagttattggatcgagcttattggtaacgctacttttactcatcgaattaagctttctgaagctgacttaaggaaaggtgatttttccaatgtccagatccaaaagactgctgaacaaagtgcttatgaaaaatttattgctaatctgccaaagttcaatgacattacaactttagcgtaaaaaaatggcttgcaacacgcaagccatttttactttttaattattaatctaagtctttcaagccatgctttttcttggaaacgcgataagctactaaaccaaagaaaattggaccaaagcttgtccaaaaagcagttgcatatctatgctccaaaactggttgcaaaaccgtaaatataattccggtgcaaacaatcagctcaacaaagactactaacgcaaccgtccatttatagttagtaaacactctaaacttgcgcggataatcttttttaagaaagaatggaaatgcaccgatcaagaaaatataaggtgcagtagcggctacgttacccatatccgtcagaatttgataaaagctagtcgctgcgctaccaccgaatgagaccaccgcaattaataggcaaacgaagacagtttgagcccacatcgcattagcaggaataccgtgtttatttaatttagtcgctgccttaggccataaacgtggatcagatcccatgatgaaggatttaattggtgaataaagcaaaacaaagagagcacctgtcattcccatcaaaccagataaagcaattgctctagtaaagaatttaccaatcaataaactcgtgttaggatccaaatgaagtgcggttccaaaggctttgccaagtgtgccatatacggtatacgtaatatttccagtattggcattggctgctaaaatatctttttgataattaactgaaaagccggtcataaaaatcatcaaaacataagaaataatagtgaacaatgacccaataattaagcctttagggaaatctttttctgggtgtttcatactgtcaatcacaccaccgacggtttccatcccaccatatgcaaagactgcataaactacgaaagaaataatcgtaattggcgtttgaaaacttttattaggcgaaataataaaactttgccacccagtaatcggctgagccaattgcccatgattcataatcaagaccgttaaactagctagaataaagactgcattcattacaatcatgaaccaaccaccgattgatgacataattttaattccagttatccctctggaagacaggtacgttgatacaatcatgaataaaattgctagtacacctatcaattgagtaccatgcaagcccaaaatattccattcttgagttgtatctttgccaaaaataagggcagagattgaaatccaaagccttgaggcgcttgcaaccagccacagcacccagttagccagccatacaaaagtcccaataaaggcctatttttgtccaactgagccagctaaccatgaataaataccaccttgagcatcatgaaaagcagacccatattctgccatcattaagccagctgggaaaaagaaacagacgccagccaaaataaaccaaatgatcccagcatatgtcatttgctcataagaaacagaaacattgccaaaaccataaaccgttgtgataatcatcaacacaaggctcatagtcgtcaatgattttttagtttgtgaattttcatcatccaagataaagcctctactttctatttacactttccattttagcatcgtttatcttgaataaatttattctaattttaggctcataagaaaaaactactagttattcactagtagcccttcatttttattcattaattcttttttcaatccaattacttaattcagttacatgtaatttagtgaccgaactaaaagtcaaaacggtgacatgatcatagttgagattcaactttttctttaagcctgacatcaccttattagtttgactcttttttattttatccatcttggtacaaactaccaaaattgggatatttagatattgagcataatcatacatagcaatatcatctttggttggttcatgacgactatctactaagataattagtccctttaggttgggtctagtttctaaataatcttgaatcatttcgccaaattcttgccgcttcttctgtgaaactttggcatagccataacctggtacatcaaccaaataaaatttttcattgactttgtagaaattcaaagtttgtgtctttccaggctgtgacgaggtcctagctaagtttttacgctttaatagggtatttatcaagctggactttcccacgtttgagcggcctgctaatgcgatctcaggcaagttatctttaggatattgatcttctctaacagcactaactgcataactactgctttcaatgatcattgacacttacctgttctttattatcagtatttttgcggattacctttggcttagcgtgcttagtaattacgtccttagttacttcaacggtctcaatatcctcttcactaggagtttcatacataatatccataattgaattttcgataattgttctaagtccacgtgcacccatatttctttggattgctaagtcagcaattgccttcagagcaccatcagtaaacttcaaattaacatcatcaagtgataacaacttcttatactgcttaactaaagcattctttggttcagttagcactctgaccaaatccttactactcaatttatcaagcgtagtaataattggaattctaccaatgaattcaggaatcattccaaatttaactaagtcagctgtagtcaaatggcgtgtccaatcatctgcattaattttatctgcctcattttcagcaccaaagccaatggtctttttacctaaacgatttttaacgatttgttcaattccgtcgaatgccccaccaacaataaatagaatgttagtcgtgtccatcttaatcatttcttgttgagggtgtttacgcccaccttgaggtggaacagaggcaattgtaccttccaagatctttaataatgattgctgtacaccttcacctgaaacatcacgcgtaattgagacattctcagattttttagaaattttatcaatttcatcaatataaataatgccacgctgtgcacgttccaaatcataatcagcattttgtagtaacttaagcaaaatattttcaacgtcttcaccaacataccctgcttcagtcaaggtagttgcatcggcaattgcaaatgggacatttaaaatacgagccaaagtctgagcaagatatgtcttacctgatccagttggtccgatcattgcaatatttgatttttgtaattcagttgaagaatcaacatccatttggctaattctcttatagtgattatatacagcaactgataagacttttttagcacggtcttgaccaataacatattgatcaagttccttttttatttcaacaggcttaggtaattcacgagctgctttaagtgaatctgctcgtaattcatcgtcaataatttttttagccaagtcaacacattcattacaaatatatacaccgttaccggcaatcattttcttaacttggtcttgagttttgccacaaaaagcgcatttaatctcttcttgatctgtaaactgatttgccattatttttcctcctatatctaccaaaaatcagattatcataaattaactaatattgataaatattaagctcgaacagcaaaaaaagcggcctatagccgctctttttgagaaattagcaaatattactattacttgctttccttcttgtcatcgtcttctttgttttcaagctttgacttagcaacttgcttagcattatcagtaataagatccatagccttacgtacagtaatgtcgtggcctaacatgtcatctgataaggtgttacgtaccatcttttcatccatgttgtattctgaagcaagatccttgatttctttatcaatttcttccttagttgccttaaggtcttcagcagcaacaatagcttcaagaactaagttagttttaactctttcagctgcattcttttcaaattgtgaacgcaattgttgttcgttggtattagtcaacttgtagtaagtttgtgggtcaataccttgacgttgcatattacccaagtattggttcaattgagtatcaacatcttcttgaatcatagcatcaggaatttcatcgatagtagcgttgcttacagcaccttcaattgcagcttcttgaatagcgtcgtttgcttgttgttccttttgttccttcaagtccttcttgatcttttcctttaagtcatcaagggtgtctacagagtcatcaacgtccttagcaaattcatcgtctaacttaggaagttgctttgacttaacttcgtgaatcttagttgcaaagtgtgcttctttaccagctaaatcctttgcaccgtaatcttcagggaaagttacaactacatcaacatcatcgccggcttcatggccttcaagttgatcttcaaagccaggaataaatgcacctgaacctaattcaagtgagtagttttcagctgagccgccttcgaatggcttgtcgtcgatagtacccttgtaatcgatagtaacagtatcgcccttttcagccttacccttcttaagaacaagttctgcattttgttcacggcgcttgtcaagttcagcatcaatgtccttttggtaaacacgagtgttttgcttaggaacttcgatacccttgtagtcacctaacttaacttctggttctacagtaacagtagccttcatagtccaatccttgtccttatccattgatacaggaacaatttgtggttggccaactgctttaatacctgcttctttaacagcagcagaatatgcatttggtaatacaatatttaaggcatcttcatataatgcttcttcaccgtaatattgatcaaagatcacacgtgatacgtgaccctttctaaagccaggaacacgcaagtttttctttactcttctaaaagcttggtctaaacctaatttaatttcatcttgtgaaatatcaaaagtaagatcaccggttgtcttaccggtcttttcccatttaacagacattaattaaatacctccaatgtcaaatttgagtttgcatcttgcatactaagttatcttaccttaaaaggccgcaaaaaacaaatttaaaagaaaaaagatgcgctcctgtgaagaagtgcatctttttttaactatatcgttagaaattagtcaaggatttcagtaacctgaccggcaccaacggtacgaccaccttcacggatggtgaacttagtacccttttcgatggcagctggcttgattaacttaacagtaaattcagtgttatcaccaggcataaccatttcagtaccttctggcaattcaatttcaccagtaatatcagtggtgtggaagtagaattgtggacggtagtctgagaagaatggggtgtgacggccgccttcttccttcttcaagatataaacttgacccttgaattccttgtgggtttgaattgagcctggagcagccaatacttgaccacgaacaacttggtcacggtcaataccacgaagcaatacaccaacgttatcgccggcttcacctaagtcaagagtcttgtggaacatttccaaaccagtaacaactgacttaagaaccttgtctaccaaaccaacgatttcaacttcgtcaccgaccttaacagtaccacggtcaatacgacctgaagcaacagtaccacgaccagtgatagtaaatacgtcttcaactggcattaagaatggcttgtcagtttgacgttctggagttgggatgtattcgtcaacgatgtccatcaacttaagaatttgttcttgagcttccttgtcgccttgtaaagcctttaaagctgaaccacgaacaactggaatatcgtcaccagggtaatcgtattcagtcaacaagtcacgaacttccatttcaactaagtcgatcaattctgggtcgtcaactaaatcacacttgtttaagaaaacaacgatgtagttaacaccaacttgacgagcaagcaaaatgtgttcacgagtttgtggcataggaccatcagttgcagcaacaactaagatagcaccatccatttgtgcagcaccggtaatcatgttcttgatgtagtcggcgtggcctggagcgtccatgtgagcgtagtgacgattttcagtttcgtattctacgtgggcggtattaatagtaataccacgttccttttcttctggtgcagcatcgatttgtgagtaatcttcagccttagccaaacccttgtcagccaaaacagtagtaatagccgcagttaaagtggtcttaccgtggtcaacgtgaccgatagtaccaatgtttacgtgtggcttagttctaacgtaatgttctttttctgccattaaaatgaccctcctgtaaatttgcaagaagtccgttgagataagttaacggataattctctgttgaatattgtactactttcttcggcaaatgcctagtaaaaaagcttaagcgaaattgcctaacgaaaatatcctttgctaattatactaaatagtttgaaaatgtaaaccttttttacttattttttattgcggtaagtatttatatattttttctagtaatttttgatgactacggccatcttttctttgtaaaaatgagactaaatcactagcaaaactgtcaggctcatcaatatattggttaattttagggtaaagactgcctaataccaaattcacttctcccagcattaatggcaactgacttggactattgtgaaatttgcttccaatgctagaaataatttcacggtacttaggttctttttctagaagcagtgtattcgccggaataaagctctccatctggcctattacccaaatttcaaacttttcttcaagtcccaagcgaactaagtcttcacaaagtgacaacctaacagcaaaatctggcgttggatctaataagacgcttcgtgcaaaagctttaaaattaggcaggtttaacttatgtaaactttcataatccgactgagtaacctgttctcgttgtttaaagttttgcataatctgccgctgtttttcttcagaagctggttttaccttttctgataagtccaccccaacaagattttttagttgtagagcttcaataaaaaaattatttttagctagaatttgacagtaacttttaaatactcgctgatcagaaaaaagatcaggctcctctttaattaaagcatatgcctgatcttcttgtttattagcgcaatagagtttgcagagtttcaaaataacgtccaatgaatgctcttcacgtaatgcttcttctagattttgaatagctgcttcgagatctcccttacgctcatcttcttcagcaagtttcaataaattttgttggcttactgatgtcatttttagtctttcttattactttcttttttcttatttattttttttattttcgtctttggcatggttcttattgtcattttgtgctttttcattgcgtttctgcatagcacgatgacggttttgatttacttccatgaccacgggcaagatcactggacgacggttagttttcttgtataaaaacttctccaaatcaccgcggatatcttgcttcaattcagtccaatcaaactttttgtgttcaaaattggcctgaattgcttttttaattacatcaattgaatcactcatcaactggcgattagccttgatatagacgaaaccacgactagtgacttttggctctgcaataatctttttcttcttacggtcaattgtaacaaccgcaataaagattccgtcatctgataggacctcacgatcacgtagcacaatattaccaacatcaccaacaccagaaccgtcgatcatggtatcttcacctggtactgggtcagttaagaagaaacgcttctgcttaaagtcatattcaagacagtcaccattcttggtaatataaatatctttaggattcattccagctttaatagccaaatcacgtactacttcaagtaaacgatattcaccaattactggaattaagaattttggcttcaaggttgtaatcaaaagttgcagatcacgaccagttgcatgcccactagtatgtatatttctgcctaactggataaccgtaccgccagccttatataccaaatcactggtttcagctaccatcgtttcaaccgcatgtgacggagtagttgcaataaagaccaaatcgcccttatgaatcgtaatcatactatgacgcttcttagccattttttgtaatgagttaagtggttcacccatacgcccagtctctaatataactgtctgctcatctggcacagtcttcagatccttaactcgcatcaacaagccttcaggcacatctaaatagcctaatttcattgaagttctaacaatcttagctagatcgcggccagttaataagacgcgtttccctgttgctgctgcagcatttaaaacttcttgaacacgattcaagttagaggctttagcagctacgataattctgcctttagcatttctgaagacattagtcacaaatttaccaatatcttgttcagatgcattagggaaagatgcttctgcattagatgaatcacttaaaagcgctaaaacgcccttttgttcaatttcagctaagcgatccatatcagtccgataatttaacgcagctgttggatcaaatttaaagtcaccagtataaacaatttcacctgctggtgtatgtacatctattccaagtgaatcaggaattgagtgtgtcgtatggaagaatgaaatacttgcattcttaaaatcaatttcagtatctgcatcgattacgtggaacaaactattcttacggcgtttgttttcgcgttgtacttcaattttagcaagttcgatactcaattgtgaaccaaatactggaatatcgtatttacgcaaaatgtatggcaatgcaccaattgaatcagcatgcccatgtgttaaaaagatacctgctactcgatctccgtattgttcaaagaaatcaaggtcaggaattactacatcgataccaaataaagaactatcagggtactttaatccggcatcaagaacaaaaatttcatcattaacttgaacggcaaacatgtctttaccttgttcacgcacaccgctcaagatcataattttgatttgatcagccattatatttccttttctatctaatttttaattcttatggatctatcgatctcaacgtaaaaataatctgtttcaattttagcataaagaataaaattatgacagagacaaaaaaagccagccttttcggctagcttcattattcaatattatgtgaaaattaacgacgaagacctaacttcttgatcaattcacggtaacggttaatgtcgttgttttcaaggtaacgaagcaagttacgacggtgaccgatcttcttaagcaaaccaacgtatgagtggtggtcatgcttgtgactcttcatgtgatcagtcaagttgttgatatcagcagtcaaaagagcaacttgaacttcaacagaaccagtgtcaccttcgtgagttgcgtattccttcataatcttttctttttcagtctttgaaattgccatagttaaattcacctttcattaaataattgccgttaacaacgtttatcgtcggcgtgaacaaataaacagcgttagcggttcacaacagtcataatcatacacattattttttaaaaaagcaagcggaaattaccttgcatccgtgatatttcttaagtataatggatgaagtaaatttctaaatcattggaggtgaatttcatgccacaaatcaaatcagctatcaaacgtgttaagactcaaaacgctactaacgaacgccgcgcttctgaattaagcaagttaagaactgctatcaagaagtttaagaacgctgttgaaagtgatagtaaggaagacgtctccaagttgcatttagaagctgaacgtgctttggataaggctgcttcaaaaggcttaatccacaagaacaaggctgctcgtgacaagagtcgtttaaacaagttagcaaacaagtaaatcttacttattactaataataaaaagaggagatctgcagtgatctcctctttttgtatactcttagacatttaagataaataatttcaaaaaattatcttctcggtaagttccatttttatatttaaattctaagtcgattgcatcccttaataaattttctagcttgtctatcttcaaccgattacgtagggctaacttaaccctatagggatgaacgcctaattcttttacaatttgtggttcgctacgacctctttgtgctaagatcttaacgaccaaaatcaattctaattgattttcaaagaccgctaataattgaattggattagtcccttcacgtaattgattatctaagcgctcaactgcttcacggtaattcttatctaaagccgactccaaaatagcgaaaatattttgtgctagggacaaatctacattttgcattactgatttttcagtaattttgttatcggtagctaccatttttagcttttgataattgcttaaaatagtgtcaattacctgatcactccgctcaattagcagctgtaaagctgactgtgtgattatatatccctcatctttgatcaaagctttagtcgttgaagcaacttcatagggcctaatttgtggctcaaccacattgaattgctttagaacagttttagtcagttttttacgcctatcaattttttcataagaagcaacaattactactacatcttctaaatcagctaagttttcaaaaatcttttgtaagtcatcaatttgtttctgtaattttttagataccttagctgttaaaaagaaaggatttttgactacaataaatttctgttcactaaataaactggattcagttaagctcgcaatcaattcatctaagccatcgctttcgcaatcgacagtcacgtgctccaaatctttaaagcgatcttccttggcatatgatctcaccaagtaatcattgagaaagtcatctgcaccccaaattaaggtatgtggattattgttatttgtatttttaaacaaagaaagtaaggtcattttttatcccgctttaaaaagtaactaaatctaggactttgcagtccgccataataccagctaatcataccacagtcttgcgttgaaacccatggtatttgctgttgagttagtgtcgttagcgtctcttgatgggggtgcccgaacctattttttcgaccagcagaaataaaaacttgcttaggatggattgcacgtaaaaagtctggattggatgatgttttactgccatgatgacccaatttaaaataatctacctgaagtttcatcctctgcataatttccttttcaccatcttgacctaaatctcctgtaaacaaccaattcttattcgctactctaaaaagcaaactcagggaatcttcattctttccttctcctgcttgatatggataaaccacattaaatgtaatctgcggttctttcacccgcattcctgcaagtaactccaataatttggtatcttttacacgaccatctaatctcttttgaaaagatggattcttaattagtccttcggccataaataatttcttaacattaacttgctctagtaatggtcctaaatcaccaacgtgatcggcatcttgatgcgaaacaaagactccatcaattgtattaattccctgacttttcaaaaatggaatagtaattcgatcaatctgaggtgtctgctttttgccactaaagtttagtttcccaccagtatcaattaaatataccttgcgaggaaatggcgtagtcactagaatactatctccttggcccacatcaatgaaggttacttgccctcgcaaaggaaaatgaatcatgctgaagaaaattacatacaagctcaacaagcccaccataattttcttactattaaagcgccagttaactttttctcttaaagaaacaattaaaataatcgttgctattaatagcaacagacactgccaccaattaatttgcccaaaagttagtagtcccaacttagtagcagataattgcccaatgattttctcacctaattcaagcactttttctaatatcggagcaaaatctttagtcagaccaaacgtcacaatattgaaaaaagcaattggtaaaactatccaattgaaatatggcactactaacatattaaaaattacagttaaaaaattgacctgataaaagaaaagcaatagtaatggcgttaataaaatatttaacaaaattgcttgtttaaaactgccaaacttatcagttaactgtaaacccaatgccaaaatatagctcaataaggctccagttgccagaaataaacgcggtactactaaaagatgtaaaatgcaggtcaatcccagcagatctatcgacgcaacatgatatttcttaaacttacaaattttgcctaaaaagtaggttaaactagctcttacaaagccggcttgaccattgcttagaaaaatacctagcaataaaaccaatgtacagcagacaaaagtttcttcatccgtcagtttcaagttaaaacaaaatacactaattaacaagacatagattccaacatgtaagcctgaaatacttaacaagtgaataacacccaaatctcgataattatttagtatttcttgattttcttgagcattattttcacccaagattaattcactagcgaaaaagcctaataactgtggcatcttggcaaaatagttctgcaattcaaaacgtaattgatgcaattgatccccaaaatcagtaatcgataatagcttcatttgacaactactgtatttcaatttttggtaaatctgttttgcctgataataattctgaaaattaaactcaccaatattagttgctggctcaattgaattgcattccccattaatttctgtcactaaaatagggttcccatgcttaagcagttctttttgaacatctgttaccttgccaccaattaaaattttaccttgagcgaaattacccacacctgttaagtagtcgtctttaattcttacctgatcagggtaaattcttaattggctctgctgggttaaaacaaaattggtttttggtttacttaaaaaaatcagtaatagaaatgctccaactattagactaactatttttaaactaactcgatatttttgtactaacagtagcaaaaagtaacccagaaaaaataaagctactattttttgcaccattgttgtacaagaaaaagccaaaaaagagattgtaattagcaacaaagcggttattaagtaaaagccaacttcatttttaaacagccaattgatctttaaggctcgcaaaagttttttctcctattcctgatacctgcattaaatcttctatctttttaaaagaaccattttgttcacgataagcaataatctgttctgcctttttttgaccaattccagttaacttttgtagttccgttacattagcagtatttaagttgatcttagtgccatccccttgattacttgggctactgctactagtactcccactattttgactattatcagctgatcctgcagttgccacattttcaaccttttcacccttgtaaggaatatgaattttatcttgatccttaagcaaagtagcgcggttaatagcttttaattgtgctctagcagtagtacctccagccgcctcaattaactcctgcagacgagcaccatttttcaatgtatatactccctgatgcttcaccgcaccggaaatatcacaagttacagtcttagaaacggttgttgaactactgctagtcactgcattagtattagtggttgcacctgaactactagtgctagactgcataacttgatcctgcactgcagcagcattttcttgatgatcccctttcttcaatccataaaatccaactacaagaattattgcaccaatgagatatgcttttttctcaagcacaaattcttttactttttcaaaattcataaaaatcacctctactatttattacgcaaaaaaagcccagaattttttctagacttcaaattttttgaatttttttagtagtgtgtctttagatagtttaatgcatcatcaaaagtgctcacagggacaattttcattttggtgtgaattttctttgcggttctcttagcaaccgcataattagtttcacttttcttcacactggttgaatcagtcggcgcaaagaagacctctgcaccttctctgctagcagctaccacttttttatcaacaccaccaatgattcctacttttccggtaggtgaaatcgtacctgttcccgcaatcttatgtcccttacttaagttctgcttggtaaagacctcatagctttcaagtgtaaacatcaatccggctgaggggccaccgatttcgccagcattaatttttaacttaggcttagttttcacaactacatgctcaactaattgaatcccaattcctggcttattagtaccctttactttaacaattttgccagtaaagtgtttctcttgcttaccacgcaaaactgagattgttactcgtgcaccaatcttttgtttacgcaaataattcatcatctcttcagttgagctgaaacgatgcccgtttgcgcctaaaacggtatcaccaatttggagcttatttttaaaactagaatttttctggacttccattacataaacgcctagatattttaagctatgctggttacctgcttttttagctgcataataaattgcattctgctgacttgtttccatataccagttttgcaactcattatattgagcactagtttgacctcctagcagctccttgcttgatacacgctcatcatacggacgagtaaaactccatagatattgcaaaaccggagccggccgactagttacgctaactgtcaccaaataaaaattattcggacgtttatttgatgacttaataaactggcccacgggcattgcctcaccaagatattcaatataataatcggtcggccaaacagcaagtaccactaataaaacaagcgcaattagtgccaagagccaattacgcaagtgctttttcgattgattgtttttcttattattcatgttttagcttctctctcaatgcaatcgctgcttttttaggtaaaaacagactaacatcttcatcaaaacgagctaattccttaatcatgcttgaagctacaaaagaattttctggactcgtaaaaagcaaaactgtattcacatctggagccaattttttattaatcccagcaatctcctgttcatagcggaaatcagcactgttgcgtacaccgcgcacgataactttagcatgcaattcatgtgctaaatttacggttacttcttccggtctttctagcacttcaatattaggtatttcccttagtgcatccctgattagatcagcacgttcttcaggcgtaaacaagtatttcttagctgtattggtcatcgcaactacatatactttatcaaaaatttcagcagcctttttagcggtctccacatgcccattagtaattggatcaaaactccctggaaataaagcgattgtcattattagtcctttcgataaatcctcacaattgtttttcctaaatggtgttctttgatcaatgaaaaaccagtaatttcacccagttctgtatgatcatcagtttctgccaccacaattgcatgatcattaagtaagttcgactttaccatctgcaacatgtccttagcgattttttctttggcatagggcggatcaagaaaaactagatcaaacttttcatcattctcagaaaataattttaatgctgcagagctgcgcatattataaacattaaaacgctgctcttccttagttaaagcaacatttttcttaataattgtacaagcagcatgattaatatcaaccagactcgcatggtcacagccccttgaaacagcttcaattcctaaggcaccactaccagcatataagtctaaaacattaccaccatgaaaaaattgtcccaatgaattaaaaagggattctttcaccttatcactggttggtcttgtccgattacttttcaaagtaaataaatttcttttagcatatttccctgaaataattctcattttagttgattctcacttttttcttgttcaagttgcaatttcttttctgctttttgggccatctcagctaattgattttcaatatgttggctatccaaatttacttcttcttcagctgaaatttcgacatgattaacaaaatccaaatgagcaatttgtcctttgatttcattgcattcgttgcgattaacataaagaacacaatatttcatttttttagaaaaataaacaatgtcaccaaaatggcgcaacttatattgatcactaactgattttaaataaataatcaatgctacccttttaattaagtgggtactttcaatttctttattgatactcatgcaactgtttcatccttttcctgtaacattttttcatttgctgaaacgttcagtactaaaccaatcgcagcagtcaagacaatcattgatgaaccaccatatgaaataaatggcagcgtaacccccgtaatcggcaacaatcctagtactgcaccgatattaaagaatgcttctgtaaaaataatagtcgtcacgccaaagcaaattaatgcgtcgaattgagaaaccgcgtgaaccccaacttccataatctgccacatcaaataaaagagtaatccaaccaataaaattgtcagaatcacacctacttcttctgctgtaatggataaaataaagtcggtatacggctctggtaagtaacctcgcttttgcatactattacctagtcctacgccaaataatcccccattgtggattgcataataggagttaactagctgggccccacctttttgctctaattcaaagggatgcaagaacgacattagtcgttggaattgataacttctttgtaaaaatccaggattccaggcaactacaataaaaaatacagctgccactaagatcacaatcccagctaaccaagttaaagctaatttagttggaacccctgatactgaaaacattactaaagtgatcataaataaaattgctgtcccaccaaaatcaggttcaacaataaccaaacacattaaaaaagccgccaaaattgctgggtgtgacaaattatgtttgatcttacccttgactaattttccatctcttctgtctagtacatatgacaaataaatgaccagagccaatttagtaacttctagtggctgcaaattgataaagcccaagttaatccaacctacagcaccattaactgccgcactactgccatgagcaaaacgtagaaatactagccatcctaacataagtatacaaattaataaaaatccccctacaaactttggatttttaaatactttgattcttaatgcaaaaaacggaatcccaaacaaaaagaaagctactatagcatagattgcttgccgtatcccatagacatttggcttaaatccattaactaataaaatatctgaactagctgaatataccaaaattatcccaaccactactaaaataagatagggaataaaaatctggtaattaagataacgtaattttcgacgcacaagcgttgcccctttatctaaataatacttttttcattataaaacaaaaagatcatcacttctatcaagtgacgaccttttaaaatttattaaactatcttagttagcacggttacgcttcttatcagccttttgacgttctgaagtgttcaaaatcttcttacgtaaacgaatagattcgggagttacttcacaatattcatcatcatttaagaattcgatagcttcttcaagagtcaacgttctaggagtcttaatagcagcagcgtggtccttaccggcagcacgagtgttagttaagttcttacccttagttacgttaacagcaatatcacgttcacgtgatgattgtccaacaatcataccttcgtaaacttcaacaccagcaccgatgaataactcaccacgttgttctactgattgaagtgagtaagtagttgattgaccttggttaatggataccaatgcaccattacgacgacctgggttccagttctttactactggcttatatgcttcaaaggtgtggttcatgataccatatccaccagtttgtgacatgaattcattattgtaaccaatcaaaccacgtgatggaactaaaaattcaagacgagtttgaccattaccagttgattccatattcttcatctcaccttttctttgtgaaagtgagtcaataacagaaccaacatattcatctggagtatcgatttgtactgattcaaatggttcgcacatagtaccatcaatttcacggtaaataaccttaggacgtgaaagttgtaattcgaagccttcacgacgaagttcttcaaccaaaattgaaaggtgaagttcaccacgacctgaaacagtccaagcgttcaattgatcagttggttcaaccttcaaagaaacatcggtacgagtttgacgaatcaaacgatcttcaagcttcttaggagttacttgatcaccttcacgacctgcaaatggtgaatcgttggcaacaaagtccatttgaagagttggtggatcaatcttaagaagtggcaatgcttctggatgttcagctgatgcaatagtttcacccacgtagatatcattaataccactaatggcaataatatctccagccttagcttccttaatttcgttacgtttcaagccaaagtaaccaaataacttagtaacacggaagttttgagttgaaccatcacgcttcataacagtgatgttgtcactaactttaaccttaccacggtaaattctaccaacaccgatacgaccaacatagtcatcccaatcaagcatggtgatttggaattgtaatggctcatcagagttgtctactggagcaggaatattcttaataatggtatcaaagattggatccatagtttccttttgagtacttggatctggatcatatgatgaagtaccattcaaagctgatgcataaacaactgggaagtcaagctgttcatcgttggcacctaattcgatgaaaagttcaagtacatcatccaaaaccttcttaggacgagcgcctggacggtcaatcttgtttaaaacaacgataggttttacgccagcttccaaagctttctttaaaacgaaacgagtctgtggcattggaccttcataggcatcaaccaaaagcaatgcaccgtcaaccatgtgcataacacgttctacttccccaccaaagtcagcgtgacctggtgtatccaagatgttgatagtagtatccttatacttaacagcagtgttcttagacaaaatagtaataccgcgttcacgttcaatggcatttgagtccatagcacgatcttccagattcatgtgttctggcaaagtatcagattgcttcaataattggttaaccaaggtagtcttaccgtggtcaacgtgggcaatgatcgcaatgtttcttagatcgtctcttcttttttctgacaaaagtattcctccccactcttcaataaaaaaactgtgactctgtcacagtttcggtaacgcattagcgccttatcgaagtgcttttcttaaatctgtatagttacgttagtgaattttaccacctaactgcatacgggtcaacgcttaacaatcaagttaaccctggatttttttatgcaaaaacaagcaaaaactattaaactatggtaaaaatataatgtagataataatttttaaaaaggagtaattattttgatcttaatgaaagatatcgtacgtgacggtgatcccgtcttacgtcaagttgccaagcctttaacatttccacttagtgatcactataaaaaattagctgatgatatgatgcaatacttaattgattcacaagatcctaagattgctgaaaagcaccaattaagagcaggcgttggcctagccgcacctcaagtaggtgaaggtgtacaaatggctgcacttttagttcctgatgatcaaggcaaaattatctttaaagaagtttatgttaacccagagattgtctctgaatctgttcgtcaagcttgtcttagcgaaggtgaaggttgccttagtgttgatgaagttattaatggttacgttccccgccctgataaattaaccattcattactacaccgttgacggtgaagaaaaaaccattcgcttaaaggattacccagcaattgtttcttctcatgaaattgatcacttaaatggtcacttgttctatgaccgcattaataagcaggatccattcgcacttaaagaagatacagtcgtaatttcttaattgttatttaaccaaaacaaaagcctgcagatgcaggcttttttgtataaaaaaagtcactggttaactaggccagtgactcatacattgggaattaagaagattgaagagacttcttataacgagcaaatgaatttattaatcatttactacatgattatcgtacaactgatgttattttacgtcaataacattgaccaaatttaagaaactgtcaaatcttttgtgtaaatagatctttctcgtaaattgattttttaattatttatttaatcaaagtaggattctaaggtgtcctgaacctgaccaaagcctttatgaattcgattgaaataacggtcattgtagctcattgcctgaatgccaataaaagcatcaagcgactgttcagttggaaactctgccttaggcttagctttgcgcttgatcacattgttaaatgattcaatcatgttagtcgaataaattgaagctctgatctgcttgggatagttataaaagaccagcagatctggttctatgtctttcaagcttctgataacatggctgtaaaccttgccccatttggtatagaagtcatgcaggacagctgtggcttcttctttgtttgtctgttgatgcacctgtttgaattcgttcatgatcttttcacgatcgtcgacgcgtactttagcgcagatattgcgcatgacatgaaccaaacagcgttgaaaatgagctttaggataagtcctggccaaggctgttttcatgccaacaacaccatcagaaagaaaaagctcaacttgctttaagcctcgggatttcatgttttgaagcatatctgtccagacttcaatgttctcgctaggtgcaatgcagtagtcaatgacctccttgtgcccattaggcttgatgccaatggcaatatagactgcttcacgctcaaatgtttctcggcgcaaaggaaggtatgtcgcatccaaatagacgcagaaaaacttgtcgcttagcttgcgtttgtggtaagcctcaacctttggaatcatctgcttggaaatatttgatacctgagctggactgtaatggctgccatacatcttttcaattagatcggctatttccctggtggtcacgagtaaagcttgataatcatgctttccaagatatccgagtgctgcttgtagccaggcagcgtgtgctgatgaaattgaccgttgcgatcccgaggcacttgcacttcaattgggccaaattgcgtatcaactttgcggaaataagcaccatttctagagttgccagtattccagccatttctggcatagggatcatagcccagaaaggcggtcaattcagcttctaacaagttattaacagcctgttgtagctctttgcgcaataaatcatttattttgtctggattgaatagagcttgagcaaaatctttggtaaaatcattcatgaaggagttcttctttctgtatgtgtttttttgttcaaaccaatcatacgagaaaggaactcctttttctaatgtttaaagaaataaatttaaggaatcattcatccttacacaaactattttacagtctcaaatttaatcggtaaaaatcaaaagaaacataattatatacttaactttataattatgataaaatttttatagctattgagtaatttttactctacattgaacgtttatacattaataaggagaatcatttatgatttacaaagttttgtatcaaaaagacaagattgtcaatcctcgtagagaaactacacaaactctttatatggaagcagacaacatggtcgaagcaagaagtatggttgaggacagtaccccctataacattgaactcatccaagaattaactggtaattcgttaacttacgaaaaagaacatgctgactttaagttaacaacgttcgacaagaagtaataaagagtgcgaattaaaaataatgaagtagccgtttatgcaatcgggggtttgcatgaaatcggcaaaaatatgtattgtgttcagtatcaggatgaaattatcatcatggactgtggtattaaattccccgaagataacctattaggtattaattacgttatttcagactattcttacctaatcaagaatcgtaagaaaatcaaagctcttgtggttagtcacggacatgaagaccatatcggtggtattccatttttgttagaaaaaattcctgaaattcctgtctatgcgacaccatttgccctttcattaattagaggcaaattggaagaacacggaattttaaagacaactgaactacacgaagagcatgaggatactgttttgaagtttaagaaactttccgtttctttctttagaactactcactctattcctgatactttaggtattgccgttcatacaccactcggtgccgttgtctttactggtgactttaagtttgacttaacaccagtaatggatcaacctgcaccagattttcaaaagatggctcaattaggcaatgaaggtgtacttgctcttctctcagattcaactaatgctgaagtaacacaatttactaagtctgaacgatttgtagctaagtcactacataatatcatcactggaatccacggtagaattatttttgccacttttgcatctaatctttatcgtgtatcaactgctattcaagctgcaattgataccggtagaaaggttgcaatttttggacgtagtatggaaaatggcgttgataatggggtcgacttgggctacttaaatttgcctaaggatctaattgttgacgtagatgagatcaacaaactaccacctgaaaaagtaatgattttatgtactggttctcaaggtgaaccattagccgctttatcgcgaattgctaatggtactcaccgtcaaatcagcttacaacctggtgatacagtcatcttctcctctaacccaattccaggtaacacattaagtgttaaccacttaattaataagttaatggaaggcggagccgatgttattcacggaagagtaaataacgttcatacttccggacacggcggccaagaagagttaaagatgatggttcgcttagttaagcctaagtacatgattcctgttcatggtgagtacagaatgcaggttattcacacccagcttgctcaacaagccggtgtacccgctgaaaacacttttgttttatctaatggtgaagttgtctgctttggccctgatggcgctagaatcacaggacatattcctgcaggtgacgtttacgttgatacttctggtactgcagatgttggcaacgttgttgttcatgatcgtcaaattctttctgaagaaggtttagttgttgcagttgctacagttgattataagcacaagcgagtcttagctggtcctgatattctcagtcgcggatttgtctacatgcgtgaatcaactgagttaattagtcaagcgcaaaagcatgtttatcatgtgcttagaaatgaaatggctaaatcaaatagaccaaaagaaagtgacattaaaaaggcgatcaccgaaaatctttcagacttcttgtattccaagactgaacgacggcctatgattttaccaatcattatcgaaaagaaatagtaaaaaagactccttagggagtcttttattttagaaaatgaataatatgcataaaaaaattaaagttcagttattagttaatgaggtcgctgggaatggcaatgctattaaagctgataaagaattacaagatatactaaaagaaatgaatattccttttaagcgacaaaaaagtcattatcctggagaattagtcgttctagcacaaaattacgctaatttacatctctcttctgaacatgttttaatcgtagttggtggagatggctcctttaatgaagttttaaatggaataaagacttctaattatcctgagacagctattacttatttgcctgcaggaacaggcaacgattttgcccgtggtgctggattaaccgcagatcccaggcaattaatcaacaatttgctccgagatcctgaaccggaacaagttgattgtggttttttcacatcaaatattaaacaaattcctaagggttactttgttaataatttcggtattggttttgatgcctttgttgttcatcagagtaatcatgagcaattaaaaaaacacctcaatcacctcaattctggaaatatgatttatggcctaaatataatcaaggcactaattaagcaggatacctttacagtgactgttaaaactaaaaacgaaactcttcgttacggagatgcatactttgtcactactactaaccatccctactttggcggtggttttgctattttgccaaaagcggacatttacagtcaccatcttgatacagtaattgttgaaaaaccgagtttacgcaagtttctctggctttttggtaagctgatcaaagatggttcacacgttaatgcaccagaatttcattatattgaagctaaagaaatcctagttcaaaccaataaaagtgaatatgctcaaattgatggtgaagatattgaaaagcagcccttcaaagtaacatttaaagttgatcattttaatttattaaaataaggaagaattccaaattcttccttttttatatcttatctaaaatatctcttttcgaattatgattttgataatattggtcctgatcaacgaaatcatgtacttgatcataaaatttcttccaataacggtatttttgatactgcttttgccactcccgtgcttcctgcaagtaattaccaagaagtccattaatctgatcgatatgtttaatcacctgattagcatgatacaattgctcttccacctgcttttgagttaacgttgactcctgatcttcaaaaaatagaacattttcttgataatttttttcttcttgcaattgtttactattgtccatttcttctttgatagctgcaatttcgtctggctgtaatccaattccagttttagctttgactaataacgactgaatatcttccaattgcacaacatctatttccattttttgataacggttcgaatcagtcaatgtgaactcatcatctgttctacttacaaatacaaccacgtttctgattaattgatctatatttggcaagcgtctcaataaattaataatcactgggttgttgcttttttctaggacatatttaatactttctttatgcttggccacttgatcggctatctgatcataatcagcctgcacattatactgtccatttttacttgttcgtgctttggtttccaagcaaaaaatcccgctagtcgtaattatcacatgatcaatttggttactccctaaactattctttttttcatagggatatggtaacagtaaattatgaattatttctttccctgtctgcacttcacgtaaacgagaattcactaattcttctgcggcagcgcctgccaagagattgctaagatggcgcaaatcacgttgagataaaatattcataggtcgcaaatgttttatttgattcaaatgtagttcagtcattcttttctgaaatgcgtttactttttgattgtaaaccttatagccagaattaattgcccgaattcgtaaaacattttgcagagccaaagctcgtttcaaatcacgtttattattcaacaaagttttttcaactatcatagcatcatgaacagtttgtgaatcagttacttttttatgtgtaatccaagctttttgataactagcatgattttctaactcattcacatactgatttaagtcattttccaaaggcaaaattttgtttctaccttctttgactattgagccataatagcgcaaattttttgtaatttcgtctaactcattgaattcatgtttgccataatggtaagttaccttagtttctccattccaactagtcttacgccaataatgaccatccgtctcaccaaattcaactaattccgccactgaacgatctaaatagtacttaatcaaataatgacaatggcctttattgtcaaaaatgcgtcgcttaatataacccggtcgcattaattcaatgatctgaaaggtcaagttcttatgattaggaaaacggtatggtaatcttttgcctgcaattttttcaattttagttatttctttcttatctgttacagataattctatttttttcattttcttcttttttcgcttttgaaaaaaataataggttaataagcctattgttagtgtaattattgtaatatccatgttaattatccatattttggaacgtatgtttagacaacaataattataccatgattttgtataatgaaaaagccccttgttttaacaattcaaggggcttttatccttataatttgatattttccattccaatcattggatcaatttcaccagaatatattttttccgaggttagaacaaaatcttctgctacttctgctttatcggtttcattctccatttcttgagctttttcgtgctgcttgctttgatcagatttatccaatgattttgtaatacccaattgctgacaaatcttcgctgctaagccagtcttacgatcatttcccggcgtcttaaaagctgccacaaatgcccgtggatcaccaactaacactaagtttttctcagctcgcgttattgcagtatacaaaaggtttcgttttagcatcacaaaattctgcatggttagattcaagatcaccaatggaaattctgaaccttgtgatttatgaatagtgattgcataagcccgggtcagatcatttaaatcttttctagaaaaggcaacttctcttccatcaaaatctgcaatcatgcattccttggcatcatcttcatcaatgctaatgatcttaccaatttgtccattataaatatctttttcaggattattttgcaattgcagaatacgatcgccaattcggaaaacttcattatgtgcttctaataccttacttttaggctgagatgggtttaaaattgcctgaataacattattaagattagttacaccaccattgccaagatacatcgcgctaagcacttgaatatcatcttttgcaaatccacgttttaaagcaagtttaacaatttgtccaactgcatcccctactaattcgggacgacagctaataaaagaataattatttgttttcttaaacaatgcttgctgatctttaccctcattaacatcatgcgccaaagtaataatcgttgaatcatcaccctgtctatgaatctgcttcaaaatagtagttggaaacgcttgcgatttaatcaggtcactgaagacattgccagctccaaccgaaggtaactgatccttatcaccaacgaaaacaatatgccgcgtatcatgaatacttgccaaaagttgtttaaaaaggaacatgtcaaccatcgacatttcatcaacaattaagatttcaccatttaactcattcaagtcctgagtgttagtatcaccaatacctaaccccaacattcggtgaattgttttagcactgattccggtaatttcacccattcttttagctgcacgtccagtcggtgctgctagtaaaaacggaggatcttcactgtaaagagcggaggaaggaatctcagccagcttgcgtaatactaataaaattccattaatgatagtagttttacctgtacctggtccacctgtcaaaatagaaatcggttggttaactgcgtttttgatggccaacttctgtgtatcgtcgtagtgaatcttaagttccttttcagcatccttgattgcttgctctacctttttatcatcatattgttctctttttttatcttcttttttttctaccaagtttttcatcaagcgagcaatatcaacttctgtttgataaatattttgtagagcagcattctcaccatcaactattactttgccagcttcttgtaaactattaatacagctagcaattgggtcgaattgattgatttgaagcaatttacttgcttctgttaataactcagctaagcctacataagtatctccctcaccatttaaagcatcgagtaatacttgataaacagcacctttaattctacgtggatcatcactagcaatatctaattggcttcccatcatatccgcggttttaaatgcaaaacccgaaatatcattaactgctgcataaggatctttctctagttttgctaatgcttcaccatgataaagctggtaaacccgtcctgcaatacgcttattaatgccgtatttagccaattttaaaattacttctgaataagaatccatcgcatttagtcctgccaaaagactatccttttgctttctagttaaagaaagcttatcaatcttagctggactttccttcaatacatctaaggcatttagccctaattcatcaataatcgtagtcgcagcctttttaccaattccagggaacttattcgaactcaaatacttagttaaagatccctcttcatgtggcaatacttgcttatagttatttgctctaaactgcaagccaaatttttcatgcattactagtttaccctcgaagcgatagctactattaatttgaatatcgccaaaattccctgtcaccttaatatcgggacgagaataatcggataaagtgccgataatttcaacgtcaagaattttatacaagtctttactattttcaaaaacaatcccgttaaccttaccggtaaattcattcataatttttcttttccttgtcatttagcatcttcataattgaagcatactgattcattgcttgttgataatacttagcatccatctgcttagcttgagcaaaatatttttgagcctggtcacgatctttttctaatgtagtgacacctagtaaaaaataaactttcgcatttttcttattatcaggaattgccaaatacatttgctgagcctgttgattctcacccaaacttaaccaaatatcgcctagcaattcctgaattcgctcatcaatttttttgatcgtcaaagcataagctaaagctttttggccttgccctaattttaagtaagttagtgccttttgataaagagttaagtcatcattaggtatctgatctaataaagccagtgctttatcaaaatcgccttgcatgtaataacacactgccagattataatttaattcttgtggctctttaaccagatgctgggcctgctccaatagcttctgtgcttgatccaagcttccttgctcaattaaatacgtcgatagctgcaaataattagcaacttgttgtggatgctgatcgatttttttgattaaaagatgaatggcttgttctactttaccttcatcataaagttgcgctattttttgatccattataacgagtccgtcttcgataatttacgtcctaaataactagtttcattccacactaccggtttaaaagtctttccgccatctagtgtttctaagacagttaaagaggtattgctaaggccgccatttttgcgaatatctttcaatggatagcctaaaagtccacccataatagctgataatgccgcaccatgactaactgctagaatcttatcatcatcgtcaggaaatctttgtgccatttcttgagcaaatgcttttccacgagcaataacatgtggataatcctcaccatgaagttcagtcggatcatatttatctggatggtgccaaaaattatccatttgtttagggaattttttctctgcatccccaaacttcattccctccatatcgcccaaattaaactctctgagtcgttcatcgatcacaacaggtaagttagcgttcattgcatcatcgatgccctgagcggtattaaaggcccgatcaagcggactggcaaaaattcctctaaatttagttccttgcaagtgatgacctaatttttttatatcttctaagctttgtggcaaaagtggtgaatctccatgtcctccttggaagcgactagctaaattccactcagttttgccatgacgaacaaaataaatttgcattgcttaaatccccctaattgtctaatcaataagaatagtttagcacaaagaaaaaggcgttcgaaaaatcgaacgctctttttgcatattttttaaactaattgtaattgcttttcttcttggtaagcagcatcaatattaccgccacctaaacattcttcacccttgtataaaacaagtgcttgacctggtgtaactgcacgagctggctcatcaaagtaaacatcagcagtattgtctgcggcatgatacttaacagtcacgccgatatcacattgacgataacggaactttgcagtacagtgcatctcaaaatcatgatctggcttaccagtaaagaatgacatatcacttgcattcaagcgactagcatatagaagtggactatcatagccctgctctacaattaattcattcttcttaagatccttgccgaccacgaaccatggatcagttgattccttagttgagcccaagcccaagccctgtctttgaccaatggtgtagtacattaaaccagcatgctcaccaactaccttaccatcaggagtgaccatcttacctgatttagctggtaagaattcacttaaaaactttctaaagtttctctcaccaataaagcagatacctgtagaatcttttttcttcgcggtagctaaaccattagccaaagcaatctctctaacttgtggcttagttaggttagctagagggaaaataaccttactaatctgctcttgactcaattggctcaaaaagtacgtctggtccttgttaccatccttaggacgcatcatatgagtaacaccattggtatccttaacagtcttagcatagtgccccattgcaatgtagtcagcatccaagtccatcgcaaactccaagaacgacttgaacttaatctgactattgcacattacatcaggattaggggttcttcccttcttgtattcatccaagaaatattcaaaaacgcggtgccaatactctttttcaaaattaattgaataatatggaataccaatcttatcggcaaccttttttacatcttcatagtcttcagtagctgtacagacgcctgaatcatcggtatcatcccaattcttcataaagacaccaacaacatcgtagccttgttgtttaagtaaaagtgctgaaacagacgagtcaacgccaccactcatacctacaactactctagtcttgctattgtcaaccattattcaatcaatcctttacttcaagcaaaatcttacgctcctcaagatcctttaaaatataatctaaaagttctacagtaggagctaattgcttatttttaaaaatattaaccttctgcaaaccgttgcgatcagtaataaccatagttaaatgcgacaagtccttattaatggtcatctttaacttagtaggcgcgttataaggtgaatcattgtaaagaggatgttcataattaaaattacccttagctgtcttcacaaagccagcatcaatcaaagcataaagcttcaactcaagattcaaagtaaacttacgtttatcaccattaatcacaactgtatttgccataattttcctcacttatttataataagatactttctttttgaaagcaactatttatttttagattgaattctttgtacaatttttactaattcttgagcgaattgctcaatttcttcatccgtattataacgcccaaatgaaattcggatcgactcatttattcttggtgaattttctccaaaacaagcaattaaaacatgtgatggctccaaagaaccagcagtacatgctgaaccgcctgacacggcaaatccattcaaatcaagatttgtttgtaaagaagtagtagatacaccattgagatgcagattaagcacatgatgtgagtaacccggaccatacccaccattaatttcataattaatttgatgatcgtctaattcctttaaaataatgtcttgataatgagcatatttcttttgcaaagcatcacgaccaatctcggatacttcacggacagcttcgccaaagccggcaattcctggtacgttctctgttccagctcgacgtttggtttcctgctcaccgcctaaaatcaaatttggaatatcgatatccgcattttcatataaaaagcctaaaaacttaggtccattaattttatgtgcagaaacagacagaaaatcaatgttcatgtccttaacatcaattttaattgtgcccattccctgaacattgtcaacatgaaaatatgcattggagtcctttaccattgccccgatttctttgagcggcataatggtaccaacttcattgttaacggccataatcgatactaaaatagtgtctggcgttaattccttttttaactgttctaaagaaatttgcccgttttcatcgacattcaaatagacaatgttgtagccctcattttccaaacgtttcattggattaagaaccgagggatgttcgatcggcgtagtaataatctttttaccaatatttttacgagcataggcagttccaagaatcgctgtattattgctttctgaaccacctgaagtaaaaataatctctccatcttgagcattaatatcttgagcaatctggtgacgagctcgatcaattacatttctggccctacgacctaattcataggtactagaggcattaccaaaatcatttttcatttcatcggtaataatatcaattaccttgggtgacattggtgtcgttgccgcattatctaaataaatttcacgcacgtttaattcatcttttctacataatcactaattaacttagctgccttagcgccgacttccttgacaaacttgtcaaaatcattgtctgcattagcatccccattatcggaaattgcacgcatagcaaccaacggagttttaaaatgacgagcaacttgtgcaaaagcggctccttccatttctactcctaaagcttctggaaagtttttcttgattaactctttttgttcttctgattgaacaaaagtatctccagtaacaacaagcccttccttaaaatctacgtcttcttcacctaaatatttcttaaatgcttccctttcaggcgaattcaacttaaaggtagcaggctctcttggaatctgaccttctacatattcaccggcactaacacagtgagcatcgtgataggcaaaatcatttactaaaatcacatctttacgatgaacatcatcttgtaatgatccagcagaaccagtcataaaaattacatcaattttttctttagttagtaaactagtcagattcatagcggcattcactttaccgataccacttaaacctaaatatacatcattgccattaacagaaaaatgttcgaattctgttgatccgaacatttcttttgtttctgcatggaaatgatcacgataaaattcagcttcttccgccattgggacgataatcgcaatcttcaatttatttcctcatttccactataaatgaaatagtgctaatagcaccaatataattaaaacaatcactatcaggatagcacgattcaatctttttttcagtcttaaagacttctcttggcgaatcgtttccttatcactcgattgattatgctgataaaattcttgtccatccccagccagagggcgtcttctaggttcttcttcagagtcatcccgcttaaagtcaggatttacatctacttcttctgaatcattatcagaaaaggaagattttagcttattaagtaggctttttttctgccttttacgataatcagagcgtttttctaccataactaatccttattatcggtctgagcattacgcaacatcatattctcccaaacagtaattgcataaattgtctttgcatcaacaatttttccttcagccaataaagtttttaattcatctaagctataccaactagaagttaaaaattcatctgcatccagtgcccgcttatcagtcaatttagttaaggtatcacaatagaaaagatacatcttttcatcacaaaaaccaggagaagaatagaattcactgaccttttcccagtaatctgtgcgatagccaccttcttcattcagctcacgcttcattgcatcaagcggacttgcatcagtggaatcaaccaaaccagctggaatttccaaagtaatctgcttaattggttcccgccattgctttactaacaacatcttttgttcatcattaattgcaataacagccgatgcaggcttatgcttaataacttctctagttgcaatttcaccattaggaagcttaattgtacgaacagccagatccaaaatacgtccttgaaaaatctgctgtgacgagatttctgtttcctttaaatccaaaatcccagctcctttttaggctaaataaacatttacacattgcagaccatttttaccttgagctaactgatatttaactctttgacctacttgcaaagttttatagccttcctctttaattgctttatagaagacaaaatatgacttatgattacgatcatcttcaataaagccatagctactgccttcatcaaattgttttacagtacctaaccgcattagttttcaaatccttcttgaacagcttctgggtaatctgcttcaacgattttagcacaacgaccacaaagcattggcaactttggatctacgccaatatcagttctaatcatccgacaacgaggacatacttcgccttcagcatgttcaactactacactagcattattcaattgctttgcattatcaggtgcttcaccatcagcaatagttaacttagatacaattagaatttgtctgaaatcagcatccaagtcttggagcattgccttagtttccttatctgggtaaatagttactgttgcttcaaacgatttaccaattaacttcttatttcttgcatcttctagagccttcaagacgtcatcacgcaacttcatgaatttaccccaattttcaagcaaatcatcatggttagcatattcttcaacttctggcatattagcaagttgaacgtaatcttcaggttctttcaagaagccccagatttcttccatagtgtgtggcaaaattggtgttaagatcttagccaatttaacagcagcgtcgtaaataacagtttgcattgagcgacgatcatggctgttttcaccatcaatgtaaagtacatccttagcaaaatcaagataaaatgcagaaagatcattagaaacaaagttgaagaccttcttgaagacagtagtaaaatcaaacttgtcgtaagcagcaagacagtctttaactaagtcatttaatttcacttccatgtattgatcaactgaacgaagatcagcataagcaacgcgattttcttttggatcaaaatcactagtgttggccaacatgtaacggaaggtatttctgatcttacggtaactttctgcagactgctgcaaaattcccattgagactgcaacatcagaagtagtatcagcttgagctacccaaagacgaataatttcagcacccatcttcttaattacatcgtttggtgaaattacattgccaagtgacttagacatcttgtgtcccttatcatcaagcacaaagccttgtgataatacttctttataaggtgccttaccagttactgcaacagacgtaatcaaactcgaattgaaccaaccacggtattggtcactaccttcaagataaagatcagctggatagtgtaaaccatcacgtttttccattacgcctgaccaagatgaaccagagtcgaaccaaacatcaagaatatctttttctttagtaaactcgccatttggtgaatgttctgaagtaaagccttctggcaacagttccttagctgtatgagtgtaccaagcatttgaaccttctttttcaaagatcttggcaatatggtcaatcgtttctggagtaacaattggggtaccgtcttctgcatagaagatcggcaatggtacaccccaagcacgctgacgagaaattacccagtcgccacgatctttaatcatgttgtaaagacgagtcttcccccatgaaggaataaagttagcttgttcaatttgatccagaatttgatctctaaacttagaaattgaagcaaaccattgagtagttgctctgaagacaacgggcttcttagtacgccaatcatgtgggtatgagtgagtaaagaagcttaacttgagcaaagcgccagcctttttaagcttatctgctaccaccttgttagcatcatcatagaacattcctacaagatctggatctggaatatctttagtaaagcgaccttgtgcgtccattggactgaagaccgggataccatacttttgaccaacacggtagtcatcttcaccaaaaccagtagcgttgtgaactaagccggtaccgtcatcatcagtaacataggtgtcattcattaccaaaccatattggcctacaccagtcttaccataaaggggatgcttataagtcatcccatcaaaatcagtaccttttaattgtttaagtactttgtagtccttccagcctaagtcttctgcaatggctggcaaacgatctgaaccaattacatacttcttaccgtcaacttctactaaggagtagtcaaatcttggattaacggtaatacccacgttacttggaatagtccaaggagtagtagtccaaattactaatgaaacatctgaatctaagatacctttaccatctttaattggaaaagcaacataaattctaggtgatttaatatcatggtattctacttcagcttcagctaaagtggattcacttgaccatgaccagtaaactggcttcaagcccttataaatataaccttttttatacatttctccaaagacgcgaatttcttgtgcttcaaagtcatgttgcaaggtaatatatggattatcccaatctgccataacgcctagacgcttaaagtcggccatttgcttttgaacttgttcttcagcatattgtcgacaaagctcgcgatacttagcacgatccattgtcttacggtcaacgccttgcttagctaattgttgttcaactggaagaccatgagtatcccaacctggtacatatggtgcataataaccgttcatattcttgtagcgaacaatgatgtctttagaaatcttgttcaacgcatgtcccatatgaatattaccattagcaaatggagggccatcatgtaaatcaaaacgaggcttaccttcgtttaactttaatctttgttcatataacttgttatcttcccattctttttgccattcagcttcacgaacaggtagattaccgcgcatcttaaatttagttttacctaaattaagggtatctttgattctcattaacaaaattcctttctaaaaaagaaagcctcatcctaaaattaggacgaggctaaccgtggtaccacctaaattgaacttattataagttccacttaactttgcgtaacgtgcaaataccgtttagattaattaggcagctgatcagctcttaggctcttatgctagtcttccaccatcactagctcgctgaattgccttcaagctttactgtcaatctaatatgcttattttttatagtcgtcaggaaaaacaattgttgggcctaaaggatctgatttcatttcaggcttaacattaattgtttcatgacttggactgtccccggtcattggtttaggtgcagcattttcttcattatctgcatcgtcagaatcatccggttgatccaactccaaatcatcagggccttgagaagagtttacgtcattttcatcatcattgtcaacatcttcatcttcaacgtcttcatcatcagcacttactggctccgaaccatcatctggataataacgctctaagttgaagtaatcatccaatgcatgttgccacttttcatcattcaaattatcgatttcagtctgtagcatttcttgaatattactacgaaattcactaacttgctcttttacacgcatataatccgtagaaatagtatcttgttgatgcttttggaagttaatattatcttccgcttgctttttggcatccgcaataatctgcttagcctctgcttctgctttctctctaatttcatcagcagtttgttgtgccgaaattaatgatttatttaaagaacgctttttttcgttatattcattaacttgatcttgataatcatctactttttcttgtaaatcagttaactttttatttaaagaaactacttcattcttcaagtcaaccacttgatcaagtgtatcaccataatcatcaacaatctgatctaagaagctatctacttcaagacgatcatatccattacgaccacgccgtttaaattccttgttgtgaatatccatcggggtcaattgtgtttctttgtctgccaaagtctgagcaccaccttatatttaccttttcttgtagtcgaaacatcctcaatcaaaatccgaccaaagtgtcttaaactcaagacatcgtcttctttaatcattatattagaatctgctatttcatgccaatttaatttaaccagctgactattaatcatcttttgaatttgaccgcggctttgtctgctaatacccgataatacagcatcaattcgcattgaggcaactattttcgttttttcaatcgaatcatcctcaggaaccaaaacttctttgaagctaatcggtctcagctttacttttgctctgccaatgcggtcaatttgctcttcaaaaaattccgttatttcttttttagtgaaaaactgccattttccttgattatcattaataatatcgccaaaaatacttgtatcaatacccgaattcgccaaggtgcctaaaataacactataatttattttagtaaatttttgcggatattcaatttcatacggctgaatctgataatcactcggtcgcagattaagccattcttcacttaaataaactcgctttttctctgcattaggatagccaccatactcttgaacaaatgcatcattaccaacaattgttcttaaaattgctcgttttcccggatccaaaaaatcagtcaaaattggctcatgcttaaaaatcagctgattaaaaagaccagtaaaatagtcaattactggtctttcctcttgattaaaatgtgggtaaaacttacttgcctgtctgcgttccattacaccatcatcctcaataaaatatcaaatatccatcttaaaacatagttttgaatgaaatataagataaataaagcaataattggcgagacatcaattccagttgaataagctaatctcgcaaatggaccttttcgaaacaaatttaaatatggatttacaaccttgtctaaaaagcgaccaacaacagaattacttagcattggtagccaactcataattgcatcaatcacgatcagcagactataaagccataaaatccacgtcagtgccaagtagattaaatttaatatattaaccattagcttaaattgtctttcttatccactaaatcactaattttgccatcagtaacaaactttggtggagttgctaaaaagattttatcaccaatacgttggatttcaccatttaatgcatatacagtacccgtgatgaaatcaacaatccgacgtgctgaactgtcttccattctgctaaaattaatcactactgctttattatttaataaattttgtgcaacatccttagcatcggaatatacccgtggttcatataaaacaatcttgcttttagccgaattcaagcctgatttaattgaaaccacattatcgcgattaactgagttcagaggcaagtcttcattttcatttttagtctgtgaggcatattcttcgtcattttctaattcatcatcattagaaattccgaaaaatcttcctaatttatcaaaagccatttatactacctccaaaactagttttcactacgatgtttaaaaaatggaatatcactgttatcatcactatcgtcctgagcgctagtttcaatttgagaaatactatcctggtcttcatcactaaaagtatcaaaaccctcataatctttcttaggctcagtaggttgggtatttcttctttgattgtcttcgctatcatttagtccccaaacactggttggatcaaccatcgtttgcttaggctgctcaggttcttgtttttcggcagcaggctgaactgtttgtggtcgatcaactggttgcttaggttcttcagccttaggagcttcttctttttctttaactggttgagccttaatttgttggctacgacctggtaattgcttagaagcagcttcttcagccttagaatcaattccagtagcgattacagttactaccacctcatcgcccaagttaggattaattgaagtaccgaaaataatgtttacatcgtcaccagcagccttagaaacaatctctgaagcatcttgagcctcaaataatgtaaggtcaggtccaccagtaatgttaagtaacacttgcttagcaccatcaatagaaacttctaataatggtgaagaaatcgccagcttagtagcttcaactgttctattttcaccgctagcacggccaattcccattaaagctgcaccttgattttccattacagtcttcacatcagcaaagtccaagtttacgtagtcagttgaagtaatcaaatcagaaataccttgaacaccttgcttcaagacattatcagcttccttgaaggcatccatcataggagtcttcttgtcaaccatttcaagcaaacgattgttagctataataaccaaagtatcaacatattgctttagctgagtaataccttctgcagcgtttttagagcgcttagggccttcaaaactgaatggacgtgtaactacgcctacagttaatgcgcccgtctcacgcgcaatttttgccactacaggagccgcaccagtaccggtaccgccacccataccagcagtaataaagatcatatctgcacccttaagtgcatcttcaatcgtttgttcactctcttctgcagctttttgtcctacttcaggatgtgaaccagcacccaacccacgggtcaacttaggccctagttgaatcttgttttcagctttgttgctgttcaaagcctgaacatcagtgtttgctgcaataaaagaaacaccttgtacgccatcgtcaatcattcggttaacagcattgccgccggcaccaccaacaccaattactttgatgacagcattcttattgtcgtctgaatcgaatgtaaaatccattaaattaaccacctttaatcaaagaatttcttaaagaaactcttcaagctattagttttttcttgcttagtattattttcatcgtctggcacagattctgttctggcagacattttgcttctattataagcttctttagcttcactttcactattagaagtcgtacttttagaaatcttggtactttttggctgagaaacggggtcttccacagcgggttcaccaaaaccatagattacgccattaacaagatagtcaacttcagacatcttatatgaatagtggacgataccataagcagctgtataaatcggattacgcataccaatttgatctggttcataaattcgggccttaacatttaacccattagcagtcagactatcaattccttgtaataggctactaccacctgtaatcacaataccacctggttgcttcaatgcattatgcttaactaaaccttttcctaaacgagtcaaaatttgttctaagcgtgcattaataatttcactaagatatacttcgtcaaccatttgctgactatttgcaccaacactattaatagcaaatttatcgttttttgaggcaaattgtggatccgcaaatccatagtccaacttaatttgttcagcatcctttttcgaaatacttaaaacagcagagatatcattagtaatatcgcttccgccttctaaatcgatgttggcatacttaatttggccatctttaataacagttgccgtacttacgccaccaccaagatcgataattaccgaaccaaaagttttttcactttcattcaatgctacacttgaaattgctaaaggcgttggcacaaagaaattattatgataaccggctctttcaatagccttcttgatattgtgcaaaggactagtaggtgcagttaataaaattccactaacacccaaggaacgtgcaatcatttttcttggatcatcaacttcagttttaccatcaatcaaaaagcgactcggcaaaaatgtaattgcttcacgatcatccttagctgctgaatgaatcgcagatctaatcgttctttttacatcatcattatttacttcttgcccttgttcaccaacattagcaaaaccagttgcagtttccagttgtaacatccctaccggaattcctgtaactacactataaatcttggcgtttgttttttctgctacaccttttaatgcacgactaattgcactagcagtttgatcaatatctactatttgaccgtgtcgcattcctgaatttggcgttgtaactgcaccgataaccttaccagaatctgcaacaacggcttttacacttgtggttcctatatctaaacccactaaaagatttgaattctccaaaattaagcccccattaatatttgccttgaaaaaattctaacataaataaacttgcaaaacagctacgatatgccataagctttcttttcactagaagttaatggtctactaaatgcacctatttctaaatcaataaggctatgtttaccagctttaattctaatagtatcataatattttagtttgctattcaaagtagcagtattgccaatcactacattaccgtccttcattactaaaataatttgtgaatttcgtctggtattcccacttaataattttacctgatttttaaatgaattaggtaaactgttaaataactttaaatcattttttaactcatctgatttattatagccaacaaaaataggtttatcttggttcacttttgtccaaggtagagctctcgtacctatttttccattatccaaaatctttcggtaagaataaccatcttttaagtaacccacggttttacgttcattaatttgtaaaatcaattgattaatatgacctaaatgaacttgtgcactttgaatttctggatatttttgggataatctttgactcaaatctttttgttgaaacaagtaatcaaaaactttatcgctagccttgatcttggataccttaacaatttctttagcaggtaaatgctctgcaccaattattttaacagtactgatattcgctaaaggtgaaatatagtatcctaaaccagctatcgccaaaactgaaaccgtcattatcagacctagcctacgtcgtaatgatcgtcgtctttctgcctgtaaatttgagagtgaggcagaaatcttggtctgcgattttcgactattcctttgttggttaaattcatgattcaagtacggagacaattctttccttggatcaatcttagttactggctttttggccatctgcctcacctacctcctagcgtgaaatttcttccatcaccttaatcacttgatcagatgcatcaggtacgcctaaagccttagaagctttgctcatttcagtagcatacttttcatcgagcaaaatatggtcaattgaagagacaaaattatttggatttaaatcatcttctggaataaccaatgctgcaccagctttttctaaatcaagcgcattcttcatttgatgattatgagttacattagggcttggaatcaaaataacgggtacacctaatgcagtaaattctgcaatacttgttgcaccagatcttgaaacaacacaagtcatttctggcaatagacctggcatgtttttaatgtatggcaaaactttaatattattaccaatatcaacattcttaattttttcttgtaccttatcaaaataaaaagtacctgttgcccaaataatttgatatggtttttgctttagcgtcattaatgacttaagcataattctgttaattgctaatgctccacgggatccaccaaatactaaaacagttggcatttttggatttaatccccatgttttttcaagatcaattttttcttcgtgcaagcttaaaacttgttgtgaccgtggattacctgtcttaactagtttcttcttttctgagaattcctttgcagcatcatcaaatgtataacaaattttatccacataatgacccaaaaatttattagctaatccaaccactgaattagattcatgaatcattgttggaatatgcattttagctgcttcataaaccatagcaccgctaacgtaaccacctgtacctaaaatgacatctggtttaaagtcccgtaaaatttggcgtgcgcttttagtagcttgtaaaaatagcttgatagtctcaaagttttttaacggatgtttacggttaaagccttgaatcttaattgttttaaagttaacaccggctgctggaacaatttttgattccaatcctttttgtgtacctacaaataagatttcatcgtttttactaataccgcgttctttcaaacgttcaataattgccataattgggtaaatgtgaccgcctgtaccgccacctgtaaaaataactctcattttatttagtctttaattcctcaacaaatctaacaaagtaatcgccacgttcttcaaatgttctaaattgatcccaagaagcacatgctggtgagaacaatagtacatcgcctggttcaactaattcccaagcacgaggaacggcctcttgtagtgtattaacaattacaatgtccttaattcctgcttttctagctgcgtcagctaacaaatatctagtttcaccataaagaacaattgacttaacatgttttttaaataatggtaccaaatcatcaaaagtgaagccacggtctaacccaccagcaatcaatacttccggttgcttaaatgatggaatagctacagttgctgcttcaatattagttgacttagaatcattataaaccttgcagccatcaagtgttgttacatattgcaaacgatgcttagcgccagtaaaggtgctcaatactgcggcgatatcatcattatcagcgcccataattttagaaattgcaatagcgactaaactattttgcaaattatgaatacctggtaatttaatatcagaaatcttcataatcttttcgttttgactttcaagatattcatcgccaatgaaataatcagcattatgatctgtctcagaaaaagtttgcattttagctggtgaaacttctttttccttagccaaaatatctttttgatcataattagcaataaagtaatcattactgttttgcgttctagttacattcaactttgcattgacataattttcaaaagtcttgtgataatctaagtggacgttgttgtaaatatcaacgatcgctgcaactttaggatcaatatcagttacacccaaaagctggaaactagaaatttcaactactaaaatatcatccttagttgccttaggtacaacttcagaaatcggtacgccaatattaccaactgcataagcatgatgaccagatttttgcaaatgatggtccaaaattctttgtgtcagcattaccgtagtagtttttccatttgaaccagtcacacaaacatagggagcatcactacaacttaaggcaacttctggttcagtaataatcgggatattcaactcctcagctttttgaaccatcggattttcatagggaatacctggatttttaactaaataatcaaaatgttctttttcaagcaaatcaactggatgatgaccgccaattacgcgcacgccgcgacttttcaattcttgtgccttagcatttttctccaaatcagctttatcatttaaagttaaatttgctcctaattgcaaaaggagttcgctaacagcaaaaccacttttacccaagcctagaaccaaaatgtttttattattataagttttaatatccttcattttatgattatccccaaattactaaatacaaaatactgccaattaatccaactaaccagaagacaatatctactttccattctgaccaacccaacatttcaaagtggtgatggataggtgtcatcttaaaaatacgcttacccgtagtttggaaagaaattacttgtaaaattacactagcagtttcacaaacaaaaacaatcccaactaacaataatgaccagggacggttaagcataatactgattgttgctaaaccgccacctaaagcaagtgagccagcatcacccatgaaaattttagccggcttatggttaaaaataaagaaggcaattaaaccaccaattacactcatacaaaaggccaaaacagcaaaattcttttgtttgaatgcgatataggcatatgtaccatatgctacaactgataaacctgttgctaaaccatcaagaccatcggacaagttaacagcatttgaaaaaccaaccagccaaaaaataataaatgccacaaataaaactaagctatggacaaccccagcaaaaggaatatataacccaaattgaaaatgatcacttgtagcaatcaagacaattaaaattgcaattataatctgtaatgctaatttttgccatgcacgcaagcctaaattacgtttgaagtaaagcttaataccatcatcaaggaaaccgataataccgtagcctaagagactgattaccaaaatccaaacaactttattcaagctgtgctgcatagcagctacccaaataacagaaataactgctgcaattacaaaaacggtcccacccattgtaggtgtgccagactttttttgatgccatttaggaccttcatcacgaatttcttgtccttcgtgatgtgaccgcataaatttaatcaacaatggaataaagatcactgtcaaaaccagtgaactaactagggcaatacaacttgccaacatcatattcattctgagttactcctttaacttaatgtttaattttcttccagcttttaattctgttcctttagccacgctttgactcgcaacagtgccggtaccttttatgcttaacttaatatctgtcaaactagcaaattggtgtaaatcactataagtccatcccgtcatatcaggacaaatgatttttcctgaagtattgacaaaaatcttagacccagactctaacttttcgccactcttaactccttgattgctaatccgatcaccgctaccaattttaaccaaattaagtcctaattgcttagtttgactttcagcttgtgcaacggttttagcttttaagtttggtacttttacagtagttgatacatcatcatttttagcaatcgaaatgattctctgcatcatcggtttgaaaattgaagccaaaatcttttcagctccgcctccaattaagtgtggttgcttaattgtcaaataaatacagtaacgtggtttacttgctggataaataccaacaacagagaaaatataattactatcaccctttagataacctccacctttagggttagcaatctgcgcagtccccgtcttaacagcaatatcggcgtttcccatcttataagcagaaccagttcctgattgcttattaagtacctttctcatgttagccacaattacttttctggttttagcactatatactggagtaccaacttttttaatctgatagccttgaattgtattgccatcagagtcagtaattttattaaccaactgtggctttaccatttgaccattattagccaaagaactataagcttgcatcatttgcattacattcacagtaacgccttgaccaaaagcagtaattgcttggtcaactggtgttttaaacgaaatcatccccggctgctcacctggaagactgactcccgtcttttcaccaattctgaacttcctcaagtacttcttccaagtcttagcacccatcttttgttctaacttaacaaaaccagtgttacttgaacgttcaaaagcttgagaaaatggaattgtgccccaacctgaagtcagccagtcatggatagtcgaaccagcaatattaacagaaccagaccggtaatactcattagggttgtaattgccactgttgactactgcagcgaatgacaaaatcttgaaaactgatcctggttcataagtatcttggaccaagatatcccgatacgacttagttaatcccttcatagtttgaggattaaaagtagggcgttgagaagttgccaaaattttcccagtcttcatgtcttcaactgtagcagtaattgatgttggtcggtaagttttctgtacttcacttaagcgagtctcaagcaaactctgcaactgagaatctagtgttaaatacaagttgtttccatttttagcaggcttataaacctgattactatttggaagctgatattcagatgcatctaccgaagaaatccggtaaccatctgtcccagtcaaagtcttattgaaataggcttcaattcccatagttccgactaagttttgtgcattagtctttttattccaaattggttgagccaatccaacagtatgtgatgcaaaaacaccattgggatacaatctagatggtgtttccaagaacttaattcctggtaatttcattgcttcaatctttttcttttgccgcaatgtcagtccactaccacctgtcccaaattgtacctgaaagaccttctttttgggggttaaatattggtaaattttttccgcagacaatggtaaaacctgtgccagcttttcagctgtcttggttttattcactacatactcaggtttattcttatagttgatcgaagtcttatctaaaatcgcataaaccgtatacaaatgcgaatcttccgcaattgttaatccatttcgatcatagatagtccctcgcgtggccttaattacctgattgcgcttataaagctgcttggtacgctgtgataaattttgaccattaactgtcttggatattccgatatataaaaatctagccgtaaatacaagaaaaaccaaagccacggccatttggagaaatctccccaccgtaaagcggtagccgtgggctttggatttttgtaattttaaattactgttttttttcattaacgaatcgtcctaatatttttgttaattagagttaatcctttttcacgtgcaattttatttaaacgtgaagtagaggtcaactccccaatctcttgacgtaaatcggtaatcttattctgttccttagcaactgtttgttgagttctagtcaattcatgttgagccgaagttgcagaaatactagaagaaactagaaagatcatcatgcccaacgtaatgacgcttccaataatcatcaaagctttttctatgccactataaggaactttacgcggatcaaggataattcgttgtcgtctttgcgaaccatttctactacttggttcatattcaatttttcttgctgagctatcagccataacattttcctctttataacttctctgcaacccgtagttttgcactgtgtgagcggttgttgttctctaactcagaagtagaggctacaattggtttgtgatttaccaaacgtagcgttggcttcataccgtccggtataaatggcattcctcttggcacctcaacttctgaatacttcttaaaaatccttttaacgatcttgtcttcatgagactgaaacgtaattacactgattcgaccacctggacgcaatatcttaattgcttcctctagcgaagcttgtaaaacatcaagttcgtgattaacagcgacccgcaaagcttgaaaactcttctttgccgggtgccctccagtccttcgtgcatacgcaggaatcgcatctttaatcacatcaactaattcaaaagttgttgcaattggcttttcccgtcgtctttctacgattctgtgagcaatttgacgagaaaacttttcatcgccatattgatacaaaatatctgccagttctttttgacttaaagtattaactaactgataagcatctaagtcctgactttgatccatcctcatatctaatcgcgcatcataacgatatgaaaaaccgcgatctgcttgatcaaattgaggggaagatacacctaggtcatagtaaatgccatctattccatctgagtaacccagttttaccaggtccttttccagattactaaagttgtcatgtaccaattctaaccttggctcactatccagttgtaataaattcgcaaagttcaacttcgccgattttatcgcatattcatcttggtcaaaacctacaagcgtaccggtgtcaattttgctgagcaaatatttagcatgtccaccaccgccaaaagttgcatctacataaagaccaccgttttttggtttcaaattgtcgatagtttcgtgtaagagtacactggtgtgtttgaatttcatattttttatagttcaatgtcgtccaaattttcagcaatatcatcatagtcttcgttagcttcttcttcaaaactagtccaacgttcttttgaccaaatttcaattcgatcagagacaccaatgatgacacattctttaatgagtttggcatgcattttcaacgttgttgtcagattaacgcgaccttgcttatcaaactcacattccatcgcaccagagtagaataaacgcataaatttacgtgtattcctcttagtcaacggaagttttgctaatttagcttcaatcttcgaccactcctccatcgagtagccaaaaatgcagccttccattcctcgcgtgaatatcatcttgtcgccaatctgatcgcgaagtttcgctggtataatcaggcgacccttgctatcaagattgtggtgatattcacccatgaacatggtctagcccccttccactaaataatttaccacaattccccactctctaccacattcataagaaaaaaatacagatttttaaatttcttttttattgtgatttttcaaaataaaaaaaagtcacaaaatattgaaattttgcgacttaagcatatacaagtaattttattttataacactagcatcaataaaagtccgatataccagaaaacagtacaggcagtcaaataatcccataattttctaactgtttttcctaaagaaatatttttatttctaatcgcatcgttcagcgacacaacaatcactaatacaaaatagcataaaaaaccataaggtaaaaaagaaggtttattcatatgtaaagtaattaatccacaagctgaaagaaagaaaaatggcataacatcgtaccctctaaactgtgctttagggaaaattttattgataaaaaaagcaactactaagccaataattggaattaggaaaatataaagcataagtattcctccattctttttattctaaactataattgatttgaaaaaaaccgttaataagcataaaatattgttcaaataggagggctgtttatggcacgaaaaaagaaaaagaaatcaggttttcaaaaattaactattgcaatggcttggatcatggcaattattactttagcagctgttattgctcaagctgctatctcacttcaaagtttttaaggattaaaaagacgcgaaagaaaaaatcttccgcgtcttttttaaactcgataagcgtttaaatcaattaagaatggataatcctgagctaaattgccccaaatccaatacaagagaaaaaagaagacaactgcccaacctaaactgactaaaatgctcattaataatacgtgtgctgatgcagcactaatacccaccatattaaaaatgagccaactatacgcaacaaaaactgcagttcctaataaaacgacaattaatctagcccataacatttccggtaaaaaacgagctgttttttgacagatccagcaacttgcaggtaggaaaactgtataaacaccgataatgccataaaaatagatatcagcaacaattcctgcacctaatgctaaccaaatttcattatcattagtatcatcaaacagaccaatcaacattacactgattggcaaaatgacgcttgacgctgcaaagttgtcataagtcataaactgatgtaagtaaagtgcacatacaccgtctactaccaatgcaataaataagccaattgccaaaacccattttcgaaacgtagacattaattagccacctgtctttcaattacagttacaacagatggatcactaatatcacctgctggtttaattctaatctgatcagatagaccaaatgaatcacgagttgtcgtagtaactgtaccaattaacaagccttttggtgagttaccgcccataccactagtatatactctcgtgccggccttcagtttgcgaccatcaaccacctgtgtaaaggcaagataattattggaagtaactgtaataataccatgtactgtttttccattcgcagcatccgcttgaacagagaagcgattagccgactcatcagtagtagtaagtaattcaaccttggaagaagcagcatttgcttctacaattcgaccaataacaccgccatcgcacatgacagccatattctttttaattccagctgaacttcctttattaatcactaataaatctgaccatgtatcaggcgaccgagaaataacagaggcgttgaccatggtatagccacttaacgtatcttttaatttcaatgcagacttcaattgcctattttctttttcaagagctgaattgcgagccttcgtctggcctaaattagtaacttctcgctttagatgattgttttcttcttgcgtatttaaaatatcatgaacactatttaatccgcctgacacgagccctactggtacatcaacaattctagtacctaaagcaacgacatcgttacccaagctttgaatcagtaaaggtgtattgcgcctattgcgcaagctaacactcccacccaaaacggataaaataacaactactataataaatgctgataataactttttattttgcagaaattttttcattaagaattgatcctatagaaaaaccggcaacagccggcttttttattatttgcgacttctacgcattacttcaatattcttgagtgattcaccagtaccaattgctacacaatcaagtggatcttgagcaataaacacaggaaccttagttgcttcagaaataacttctggcaaattcttcaagagtgcaccaccaccggttaaaacaataccatgatcaataacatcggcagcaatttctggtgaagtttgttccaaagtctccttaatagctacgataatgtcttgaactacatcttgaatagccttggcaacatcaactgcttcaatatcaacagattttggtaaaccagttactaaatcacgaccacgaatattcattgattcaatttctttagccttttcaactgaagctgaaccaatttgaattttaatgtcttctgcagttctttcaccgattaataagttaaagtttgagtgaacatagttaacaatcgcattattaaacttatcaccggcttgacgaattgaagttgatgaaacgattccacctaatgaaattgtagcaacatcagtagtaccaccaccgatatcaacaaccattgaaccagtagggtccataactggaagaccagcaccgattgcagctgcaaatggttcttcaattacaaatgcttcacgagcacctgcaactctagctgcatcaattacggcacgcttttcaacttcagtaacacctgaaggaacacataccattactgaaggcttggaattaccaacagtcttttccataaaatatttaagcattgctgcagtagtatcgtaatcagcgattacaccgtccttcattggacgaatagctacaatgctgcctggtgttctaccaatcatttcttttgcttctgaaccaacggcgattacttcgcctgtttgtgtattctttgctactactgaaggttctctaagaacaatgcccttaccttccatataaacaagtgtattggctgtacctaaatcgataccaatattctttgtacctaatccaaacacaaaaatctctccttaactgttgcggtctctaaatcttgactaattatagcatactataactttaaaggcgcctttcacacaaattttaaagaactttaaaacaatttttctcacgcaaacttaaatattgaccttctcccacgataaaatggtctaagaaatcaattttcatcatttttgcagcttgacgtaaactttcagttaattccaagtcacttgcagatggcgttaatttaccactaggatgattatgagcaataaaaattccagagcagccataaataactgcccaccgaaaaatttcccgcggatgagcaattgatctattcaaagtcccttgaaatagtttcttctcagcaataatgtggttgctattgtcaatatacaatgcccacaattcttcctgcttgtgtcctatcagcttatcagctaaatacgtacctacttcaatgctagatgtcaaaattgtctttctcttaggtgaagcgcagcgcaaacgatctagtactgcctcagccgtaatagcaagttcatccgagcattctgaactggtaataaactttaatagatcattaaacgaatttaaccctgtgtttttcagaaaaacatttaagtcctgcaacgtatgaattcctttattttctagttgttcaaataattgtgtcaatagctctaaatctgttttgacaaagtaatgatttggttttctttttaacataaaatccccctcattacttattacgcaaaaaagagctaaatttttttcagaaattcaaaaaagttttgacaaatcatcgttgcattctgcttatctttaacagatggtgctttcaaatctggtaccatcacacattttaaccctgcattagcagctgcttgaacaccggttgatgaatcttcaaaaactaaaatattttctttaggtaaattcattttcttagctgcttctagataaatatctggtgccggcttagccttaatgtgacctctttgtacatcaagataactaagatgaaaatcaaaataatttctgattccagtcacccacatagcatgctgaactacattttcataattacttgaagcaatcgccatcttcaagccacgcttttcaaattcgtctaatgcttcttgaacaccaggttgcagctttaactttccctcatcagtccattgccacaccaagtcatcagttcgcttaataaaacgatcacggtctgcttcagttttaaaatatttatgataaaaatcctgcatctctttaactgtagcaccagttaacttgagataagcatcccgcggcgtgcccaaattctcttcttctgccgcctgaatattagcatcccaatacagcttctctgaattaactagcaaaccgtccatatcaaagataatgccttgaatatcatcatctagcccttgtacgcgcatcacgttttcctttccaatttaaaatagcactaaccaaataaaaggatccactaacaattaaaatatcattagctcccaagtgatctcgcagctgggtaaaagcagctcgataatctttttcataattatatcttttttgtacatcaattggaaaatcatcttttttagctactcgcggataagataaagttgtcagtaaaacttcatctttatcatcaaacaagctaaacacctgctcaagatccttatctttcatcatagtcactaaagcataaagcttgccatgcttttgctgggtcatacgatgaacgactgccagcaaattactcattgcctgaatattatgtgctccatctaaaatgattagcggattttctcgtaaaatttgatagcgccctggaataatcgtttgattaatcgctgtttcaacttcttcatttgataaaggcagtttcaacaaaaagaacgcctggcaggcaacggcaatatcataggcttcaacttgtggtcgtaaagcaaaaactagctttcttttgtgatcttgataaacaatttgattatcaagcaaaacactaaagtctcgtcctaattgataaactatcgcatgttcttcttcggctttacttttcaaaattggccaaacaacttctggcacgttacctaaaactactggtctttttgccttaataatgccgcttttctcacgtgcaatatcctgaattgtaggtccaataattttttcatgatcgagaccaattgtagtaataacacttacttctggcataattacattagtcttgtcatgttctccaccaattcctacctcgataacagcataatcacactttttttgagcaaaatagacgaaagccagtgcgacttcatattcaaaggttactaacgaaaaagttgagtcctgctgctgcaatttctcataagtaccctgcacaatattagctgttttaactaaatcctgatcactaatattttgattatttaactgtattctctcattaaattcatagacatacggtgagacaaaaaggccagtcttttgaccagccttttttagtaggtttgataaatagtatgaagttgaacctttaccattagtgcccgtaatgtgaatcgttttaactagatcttgaggattgcctaattccaacaataaccgcttaataaaagacaaattatttttaggatgtaaatgaggcaaagcatataagtaatcgattacttcttgagctttagtaaatttcaattatttactctctttcaaatcttgaattctttcacgaacaccggctaattgactttcgtagtcagccttcttttccttttccttgttgacaacagcttctggagcgtgaccaacaaagcctttgttagccagcttcttttcacaacgagcaacttcgtcttcaagacgcttttcttctttttccatcttttctagctcatcgtcaacattaacaagttcagttaatggaacaaaaatttgtgcgcctggaattacagcagtcttagctaattttggtgcttcaacttcactagctacagtcaattcctttggatgtaagaagttttcaacgtaatcagcattttcgtccaaaacgcgcttgttagcttcatcgtctaattgaatcatgatgtcgatttgacttgacattggtgcattaacttccatgcggatgttacgtactactttaatagtttcaattaagaaggccatgtcttgatctgcttgcttgttttcaaattccttgtgagtagttggatattcagcaaccataactgacttaccttcatgtggcattgaaagccataatttttcagttacaaatggcataattgggtgaagcaaacgcaagatttggtcaagaatccaaattaagttttcttgctttcttgcctttaattcttcatcgtcaccattcaaagcaaccttagaaatttcaatataccagtcacagaagtcattccaaataaagttgtaagcttcacgaccagcttcaccgaattgatattcatcaaacaagcgagttacttcactaacagtatgattcaagcgatcgaaaatccaacgatctgataaatcaaatttagaagcatctggcatatgagctggtttagcatctgctggcaagttcatgattacaaaacgacttgcattccaaatcttgttaatgaagttccaagcagcagataatttcttaggatcataacgagtatcttgaccaggagcagtaccattaagcaagaaccaacgaagggcgtcggcaccgtatttatcaactacatccattgggtcaacaccgttaccaagtgatttactcatcttgcgaccttgttcatcacgcattaaaccgtgtaaaacaacatcattaaatggacgcttgccagtaaagtgcaaactttggaacatcattcttgatacccagaagaagataatatcgtaaccagttaccaaggcattagttgggaagtagcgcttaaagtcttccgcattagtatcaggccaacctaaagttgaaaatggccataatgcacttgagaaccaagtgtcaagtacgtctggatcttgttcccagttttcaatgtccttaggtgtttcttcacctacataagtttcaccagttttcttattgtaccaagctggaattcggtgcccccaccacaattgacgtgaaatacaccagtcgtgaacatcttccatccagtgatcaagagtttgttcaaatcgttctggaacaaagtttactttgccatcagtcttttgattttccaaaactttgtcagcaagtggcttcatcttaacaaaccattgcttagaaagacgtggttcaacttgaacgccagaacgttctgagtgacctactgagtgaacaattggttctatcttaatcaagtaaccttcttctttaagatccttaactaaggcttcacggcattcaaaacgatccataccagcatacttgccagcttcttcgttcatcgtaccatcatcgttcataacattgattctttcaagattatgacggttaccgacttggaagtcgttagggtcgtgagctggagtaatcttaactaaaccagttccgaattctggatcaacgtgttggtcttcgataattggaatgtgacgaccaacaagtggcaagatcaattctttgccaacaatatccttgtagcgcttatcaccaggtgctaccgcaacggcagtatcaccaaacatcgtttcaggacgagtagtagcaatttctacataacctgaaccatctgcaaatggatacttaatatggtaaaaggcacccttatcatctttgtgaataacttcgatatcacttaaagcggtttgaagtgctggatcccagttgatgatgtattcaccacgataaattaagccttcattgtaaagctgaacaaaaacctttttaacagctttagaaagacccttgtctaaagtaaatctctctcttgaataatcaagtgaaagacccatcttagcccattgacctttgatgattgatgcgtattcatctttccaatcccaaacctgtttaacaaaagcttcacgtcccatttggtgacggtctttgccttgtttacgcaattttgcttcgaccttagcttgggtagcaataccagcatggtccataccaggaaggtaaagagtatcatagccttgcatccgcttaaaacgaattaaagtatcttgaattgcagtatcccaagcgtgacccaagtgcaacttaccagttacatttggtggtggaataacaattgaatatgggtgagcttttttgttacctgatggcttaaataaatcttcatcaagccaggtttgatatctacctttttcaacctcgtttgggttgtatttaggtgctaaatctgtcataaaattcctccaataaaaaagtcctagacatattgtctaggacgatcagttaaaccgcggtaccacctacgttaagcatgtatcaaacatgcttctcttgaagacgataacggcgtataccggattaacctactttttattttcaattaatcagctaatcaagctactagtcaaccttcggcctctcagctgtctggcttttctctgttaataaagtcgacccctcttgattcttgctttggttatgattatagcatgaacttcactcagaaaaaagggttaggaattagtcgtaattaagttagccatatgtctttattctttgaataaatcagcaatacatttttccgatgaatgatattgcttatattgttttaacacgttgattaaatcatcatagtgactattccaaaaataataattttcatcataagatttcacactcttaagatcgttataatactgcttaacaaaatcactaggcttcactttacttttatagttatttgtatatcgctgatagtcttgatgataaagaatgtctagaatttcaatctcaggtctagtacgaagttctactacttcggatactttctttttatacacttctggaagattaaacttttcggttttggaatcaagtatcctataaattttaacctttctacttctaaaccctttattcaaaaattctttagcaaactttttagcatttcgtgctctaattacttcaccttcaagaagatcatcctcgttgaattttagtgcatcgtgttccaatagaacttccataattgctcgttcagtatgaccttctacaataatagcgattagatctgtagagttactcatccattttaaccgccttttctgtagccttctttaaagccatgtaggcatcataatctggagctgtcccacctaaataatctgattcaaaaacatcggctttatttagatcgcttcttacatcagcagttgaatatctttgaagctgaatcttgccttctctcttagtaatatattcttcatcagttctttcaattttatccaaaatttcagtatagtgcgtactaaataccaaagtagctctatttatgttgattttaggattagtaaaatactcaataaaagaatctacaatagcgtgattaaagtgattctccaactcatcaataaagatgatgccaccaacggaaagtgcattaattacctcgccataaagagttatccctttagctgtaccagaagacaagtattttgcaatcgttgtaaaatcattttctgcaatctctgtatctttccctttaaacttcagcttaaacaattgtttagtagcaccagagccctcaggcttgttttcaattttaagatattcaattgttggatctaaaaagtttaaaatttctccaggcacattgccagaaccatacatcaatgcattaaagtcagtaaagaacaaagtatcaaatggtatttgaggataatacttatttttcgaaataatcgctctaaaaatcgaatcatcagacgacaaaattgaagaagctaggtcgcctaattcttttctgtctaattctggttttatatttttgaaatcaaataattttttctttgaaagattaacagttaccttttttcgatataccgtttcagactcaatatgccagcttttacttaaagttttctttaacttgaaaactaaactatccttataaactacatgatcagttccataaaaataagttgtaacactaataggctcatttcctattagcacatccgttagcttagtttgatcaattgacttttccatcacaactgtttgaagaattcctatcaagagtttcatgatcgtagtctttccagtagcattagtccctactagagtgattaaattattcacccataaactgccgagcaaatgagttaatcgatcagaggtattagaagtaacccttgcatcactgaccagtgaaaattcaagatcatcctcaaatagcggatgatcttgaatttctaattttaaaaagtataatttatttttattcataattattcacctaaaattgttttattcaggctaaattttatcatatttttgcattttatacataaaatctgtttaaaatataaataatcctcatcaagtagttactacttcatgaggattatctaaaatattctactttctaatcatcttaactgcttgaatcaaaatcgttggaatcagagccaagccagcaagccacattacttcttgcccagttaacggagtaactgcaaacaagctatgtaacgccggtacaaacaaaatcaaggctaacaaaattgttccgacagcaaatgctgctaaactgtaccagttatttttgaaaccgatcttgaagatactgtgttgtgaacgacaattgaagccatgtaaaagccgagcaaatgtcaatgttgagaacgccatcgtcgttgcaactgcaggactatcttttagtccgatcaaaaaggcagcaattacactaatcgaaatcaacaaaccttgaatagtaatttgactcacaaaggctttgtccaaaataccagccttaggatcacgtggcttacgtttcaaaatatctggatcacctggctccattccaattgctaaagctggaagcgaatcagttaccaagttaataaagagcaattgaaccgctacaaatggtactggtaagccagcgagtgaagcaaataaaacagtgataattgctgaaaggttacctgataacaagtagccaatagcgtttttaatattttcataaactgttctaccgttagcaacagctttgataattgtggcaaaattatcatcggccaaaatcatgctggcagcatctttagatacttcagtaccagtaatccccatcgcgacaccaacatcggccttcttcaaggctggtgcatcgttaacaccgtcaccggtcattgatacgatacgatcttttctctgccatgcattaacaattctgatcttgttttcaggcgatacacgagcataaaccgaaatcttctcaatgttttgatcaagttcttcatcgctcaaagcatctaattcaaggccagttaaagccatgtcaccttcattgaaaataccaattttcttagcaattgcaacggcagtcaccttatggtcaccagtaatcatcacagtcctaatcccggcttccttagcacgagcaactgcagctacactttcttcacgtggtggatccatttctgaaacaaggccaataaaagttaagccatcttctgcttcagtagaaagctcttcatcactttctttataagcaaaagccaaaacacgcaaaccattttctgaaaagtaattgttttgtgccaaaatttctttacgatcttcttcagtcattggacgaatttcatcgccgaaacgaatattgacacagcgtttcaagagcacatcaattgcacctttaacaaaaatagttggtacagtatgaatcaaatgcttagtactcatcagcttacgatctgagtcaaatggtacttcttccagacgcttagaatgttcgcgtaattcttgttctgataagcctaaaacaccattacctaagtcaattccgggcacttgacgatacatttccagcaaggctgactcagtcggatcaccaattgccttatcttcggccaaacttgcatcgttgttaagcactacatcataaagcaagtagcggtgaagttgattactcaaatccagctcatttggctttaaaactttaccaccaatatagatgtcctcaacagtcatcttattttgagttaacgtaccagtcttatctgaacaaattactgatacagaccctaaagattctacggctgccaagtttttaataatagcattttctttagccattttttgcgtacccattgcttgcacaatagttacgatagaactcaaagcttcaggaattgcagcaacagctaaagctactgcaaatagcagtgaatcaagcagcggttgaccacgccacatttgaataccaaagatcacagcacacaagattaaaatagcagtagccaatcgtgatgaaaactggtcaagtgatacttgcagcggagtgcgacgttccttagtttcattcatcaaggaagcaatcttaccaatttcagtctgcatccccgttgccgttaccacaaccgtagcacgcccataagttactaaggaactggagtaaaccatgttaacccgatcagctagcggcacttctttttcaaaatcagtgtccaacttgtcaacattagtcgattcaccagttaatgaactttcgttgacttgcagagaataattttctaaaattcgaccatctgcagtaactaagtcacctgcttctaacaaaagaatgtcgccaggtaccaagtccttggcctcaatctccattttttggccattacgcaaaactttagccgttggcgcagataatgactttagcgattctagcgacttttccgccttaacatgttgtaccgtacccaaaatcgcattcagaatcaatacaacaataattaccaacgtactttccagactgcccgtaaaagcagaaattattgccgcgataattaggatgatcaccattaagtctttaaattgttctaaaaagacctgaaaagtaattttcttctttccttcaactaaagcatttggaccaacttgagctaatttctcttgagcctctttagcgctcagcccctgctttaaatcggtatttaactctttagctatctcgtcttttttctgacgatagtattccatgtaaagccctccctaaacataagagtaatttaagcaaaaaaatagagactactggctaaaacactgtttagtcaatagtctcatcatttaaacttacagcggaaaataaatttcgttctgacgccgtaaatacaatttatgccgattactccctatttacttgtacataattaaaccatatcaagtaggtagttggcaagctattttaactttcttttaggaagttttctaattgttcatcggtaaaatcagaaccgtaattttgttcaaggagatgcatgatctcttgcttggtattaccagttcttttaagtgaagaaactaaaattttgacgcctcgtttaagtccctcttctttaccttcctcacgtgcgtcttgttctcgctccagtattttctcttcgtagtccatgatataatcactccattccgagcaataagataatcatttgtacttcttatctttcaataatccgttagcaatatcagccgaactaactggtacaccgactaaacgctcattttgccacaaatcaaaaaaatcagctggcatcatttgatcaaattcatcatctgaattcattaaatccttataaacacgtgacttctcaaataaatttagagcctgcttaggataaatgtttaatctcttagcaattaagtcgctaattgcttcagctagttgctgatgaaattgcttttcactaatttcgggaatcatctaaccaactccttatctatgaacgttaaagctttgagagctctttctgtcttgaaacaatactgctccgaataaacactcggttttaattttagcagagcctcatctaaatctagattaccatgtttccagcaattaacaacagaaaaaagtttaccatctgctgttgggccaatgacgatatcagaattatcttttatattattcattctattttgaatgacaaacttaatccaatcaatatctgcttggtaaactaatattttcaagtcgggttgatcagcatcgaatacatatctatttaatgtcggttgacctgaatatctagccttacgctttgcccatttttctgcttgtctacgattagcagtcacataaaagccattaccaaaatcagttgtaaaaacatttttatttatacgaggctgataaacagcctgattgcttccatgatacaaaatgactttggtattgcttttcatgaatcgtgatgtatgcgtatttttcatcgcgcacctctttcataaatagtaggacaaaattatcctccactatttattacgcaaaaaagcacgatttttttgtgagaaattaaaataaaaaaagaaaatgcctgagaattatatcccagacattcaccaatttacggctctttctcatttctcttccttcacaatataaattggtcgttctttaacttgtaaatagattttaccaatataacggccaataattccgatacacaaaagctgcaaaccgccaatcaataaaataattgaaattgtgctggcccagcccaaaatacttgaaccaggaactattagtttacgaacaattacaaaaataagaccaataattgacaaaatgaatgaagttgtcccaatccaaacagctaagttaagcggtgcttgagaaaaatcagcaatcccgcccaacgcatatttgaataatttgtgagtcgtccaatcagtttcaccagctacgcgctcgacattgtggtactcaagatacttagtcttaaaaccaacccaagcaaaaatacctttagaaaagcggctgtattctttcattgataaaactgcgttaaccatctgcctggtcatcatgcgatagtcgcgtacgcctgaaacaatttccactttagaaatgcgattaatcaccttataaaattgattgctcaagaaagacttaaacttaccttcccctttacgatctactcgtctgcagccaactgcatcatagtcaccagtctgcaaaattttatacatttttggtaaaagtgaaggcggatcttgcaaatctacatccattaagacaatataatctcccgttgcagctgataggcccgcatagatagcggattccttaccaaagttacgagaaaaagaaatatagtgaacatgtttgtcctgctcatgcaattttttcaattcggtcagtgtgttatcattggagccatcatctacaaaccaatattcgggcgtcactttgggcattttagctaatactttttgcactgctggataaaaaagtggaattgtttcttgttcattaaaacaaggaaccacaattgataatttttccattagatttcttctttcttagcttttctaaaagtaactactttattaattacaaattgaattaaagttgctacaaaagttgctactattttaacgattaagtgcggataacccaatttagtaacgaaaataaatagggaaaccgtagtaaataccgtggtaatctgaccaacgataaaataagaaataaatcttaatatcatgcgatcatgaactttaaagttagtataagaattccataaaaagttattgatgatcccgcaggtagacgaaataatgttagctatttcaacattcatcttgaaatgcgtcaaaattgtataaattccaaaatcaacgactagccctaatacgccaattagaacatactttactaattgaacaaaatcttctgaatagattgctgttttgattttttccataattattcctaataaaaaatccagacaagaggtcctggatttcaacatatttaactaatatggtcttaattatatcattgtttttaagctctacgttttcattattaaagttaaaactttaataggaacaccttttgcattaattataatttttgtcattcaatctatctgtcttgttagtatcctcatacaaatgataggaactcttaatcttatgcctgccttgtggatcaaacatgcagagaaagataacatagcaacactttaaatttcgatatgtgctgcatttcaaaatcatacagatttccatcaacatcctcaaccaaaatatcgagaataacagctttttgcttagggtgtttgggatcagcgacctttctctgcttctgcagataatgaatatctctaatctcaatctccggcaccagtccctgtaggacatgcttgcaaaaattcttgttagacataatctcaccaaagattacatcctctgtgaagccaaaccagggcttctttttcttgtgcgtattttccattgcgcacctctttcataaatagtaggacagaattatcttccactatttattacgcaaaaaagtgcaatttttttgtgagaaattgaagttttttaaagttttacccaactatatcttccaacttcaattccagatattctccccgctttaagttagcaggcaagcttaactttcccatcgaaattcgctctagctcaacgactttcatccctaccgcaccaaacatacgcttgatctggtgatatttaccttcacaaattttaatttcagttgtagacctatcgtgctcttcatcctgggataatatcttcaattctgctggctgcagtttggtcccatcgcctagtgtcattcctgaagcaaaagttttaacagttgcatcattagctacaccagcaatttcagcacgataaactttatcaacatgcttaccaggtgcaagcaattcatgattcaactgaccatcattcgtcaaaaggagcaagccagtagtatccttgtccaaacggccaactggcacgattccttgataacggtcctgcggtgcaagcaaggaaatcaccgttggctgattgcgatcttccgtcgctgacaaaacacctttaggtttattcaataagaaataatgatatttttgataagcaacagcatctccgttaacggtaacctgatcgctttctttaacttgctgctttggcgttttaacaatcacatcattaaccgcaacaattccttttttaattaattggtgtacttcttttcgtgagccaacattcatattggccaaatatttatctatgcgcattatgtctttctttcgttcttatgtgttgattaatattaattatataagaaagttaacccaatttcgaattgcgacactaatcaaaaacggtcgattttgttttcgaccgtttttacgcgcgttttgcgcgcgattatttgcttaaaatatattttgtagctctgccttcacccattcttctaatataaccttgtttttctagttgccgcaaaatcttcaaaactttcgtcctaccaaacttactcatttggctaatttgcttcgtagtatccgcaccttcatgaattatttgatatactttcttttcatcattagacagatcgtccgtaataaattttaaaactggcaatattatctttatcgaattatcaaaaatttcaaactgcggttgaaccaaactacttctataagaatcatttattcttcttacacctgtaccaaattgctcaattaatcctaacctaaagaaaacattagcaataattggattacgcaaaatggaaatctgacctgaaagatattcttctttgctaagtccttgtggcaatccacctggagatactacttcaattctgtcatcatacatagaaattttaatttgcgaattaatgttccaaactcgatgaactaaggcattggctattgcctcacgaaaagcttcttctggaatctgacttacaatatttcgcgttgctccctgtatttcttcatgttgataatattgacgatatttttgaattgcttgcttatactctttaagaatagattcatgctcataacttgctcgatcaagcataatattaatgctttcaccaaaccgaacaatatcaattccacgataattatttttgtctgccaaaagctcaccggcattagtgtaactagtatccttacgctctaaattaagcgtaatcaatatatcagatgttaaacttttaattcctatcttttcttttaatgcttcttctaaaatgttaaatgacaaattttggttcatcgcggttaaactatcataggttctattttcaccaattaagattaactgtgataattcagatcggtccacttcgatcgaagcactgtcattactcttataggcctttgatttgtataaatatggaggattaactccttgctttactgttaaagtaaccacattagttttaggatcaatttctaaattataatctggatttggtttgatcgaatcgttgattttattttcaacatttaaacaaaattcaactggatttttcacaccaacgattgatccatcatcctttattccaaatttaattttgccactgccataatttgcaaatgcactaaccgtttttagaaaagtattcgtcaatttctctttaaattctaaatttttggtttctctcatttaggtcaccgtttctaaactatttagttataattatactctttcacgcgcaaaaaaacggtcgaaaacgaaatcgaccgtttttacgtgcgttttgcgcgtgcctattatattaactttaaatcaatacataatactactagaagtttccatattaacaccatatctttctaaataattaaactgtatcatattaaatttcaaaaacaccagtgaaattaatcctctataacaagtcagcgtcttcttgagctttatcatccaagaatttttcatttggataaattggcgtaatctcaataccagccattgccctttcaatcaggccttcaacgtcaagacgagcttcatattcacgcgctttttccaactttggcttagtcttaggacgcggtggagcaaaaattgtacaacaatcttcaaaaggttgaattgataaatcaaaggtaccaatctcttcagctttggcaataatctccgttttatccattgttgcaactgggcgaataaccggagtagtagttacatcattgatagccaccattgattgcaaagtttgagaagcaacttgaccaactgactcaccattaaagatagcccagccgccacgttgtgcacgaatgcggtcagcaagctgcaacataaaacgacgttgcacagtcatcaaatagccttctggcagtttttccttgatcgtttcttgaatttcagcaaacggtacggcaataaaattaatcttaccagcgtagtttgccaaaataccagtcaattccttagccttagccaatgccttttcagtagtgtaaggtggactaaagaagtgaaccatttcaatatctactccgcgcttcaatgccagccatgaagcaactggggaatcaatcccaccactaagcatcatcacagccttaccagcagtaccaacgggcatcccgccaacaccatggagcaactgattagaaatataaacggcatcttgacgaacttcgattctcaagaccaaatcaggatgcttcatttcagccttcaagccatccatatgatcaaacaagtagtcaccaactagattattcaattgattagtgtcgtattcaaacttgtggtcactacgcttggtattaaccttaaaagtcattcctggcttaaaagtctcttgcatcaattccaaagaagtcttttcaatatcttcaagagtcttaggaatcttaattgctggtgagtaagtttgaattccaaataccttcttcagacgttggtcaacatccttgaatgatgcgccattcaggacaatgtgcatccgatcatgacgaggatgaaattcaatttgtgggaaatccttaagaactttttcaacgttacttgctaagcgattgatgaagtcctttctgttcttccccttagttgaaagctcgccatagcgaaccataacttctgtgtattccattaattttctcccaaatgattaattttagcaaaatgattatagatcttgtcaaagaccttaataaattcatccgcttcttgaagcgtattcgtctcatcaaaacttaaacgaattgcactagtagcaatcttatcatcaattcgcatagaaaccaaggtgctagcctcatctgccgtctttgatgcacaagcagaagtagttgaagtataaatatcttgatcttctagcgtatgaaccaaagtttcgccccgaattccctctaaagcaaagcaaagaatatgtggtgcaaagccatcgcttactggtgaaaaaatattaatccctggtttatcttttagataatcaacaattttagccttaatttctgcttcacgcttggccttttctggttcatcttctaaaagcaaacgaattgccatagccattcccgcaattgcaggcaagttctcagtacctgaacgcaagcccttttcttgaccaccaccatcgtgtaatggggtcagcatcttgccttcttttttatataaaatacctataccacgtggtgcatggaacttatgcgcagataagctcgagaggtctactcttggtgtaaaaaccttatcccaaatatttttgccaagtgcctgaacgttatcaacatggaactgaatcgttggataattttcaagcaaatcgctaatctcatcaattggttgaatggtgccaatttcgttattaacgcccatgattgaaaccaaagttgtatcagaatcaatcgcgtttcttaagtcattaacgttaactcggccttccttatcaactggcaatctggtaacgcgccaacccaaattctctaacgcgttaaaactattggctacagatgcatgttccacgctagaagtgataatatgcttaccaaattcacgcttttgaattgcagtccccttaattgcggcattatttgattctgttccaccagaagtgaagaaaatttcatgctgcttagtccccagcaaatcagcaatttgtttacgtgacgcctcaagcaattggtgtgcacgatcacccatcttatgcaaactcgaaggattgccccaaatattagtcgctactttattgtaagtatccaatacttgtggatctatcttcgttgttgcactattatcaaaataaatcactatcattaccccttcatttaaaaaacggtcaatcgcttgaccgtttcaagacttttcaattttagcttaaataatgaatcgcttcaattaattactcttctcttctgaataatatgcattttcaagtcgttgataactacctggctctaccttttcaattgctgtagcaattgtatcaagggcttccttatagttatattcattatatagctgcattgctgtcttttgtgcttgcgcaattgaatccttatctgcatatttatttgaatactgcatcgtcaattcaactaggttagcagaattaatgatgtcatctgcttcacgtttaagccgctccacatcatcagaaatttgaattaattcagctgagatcttttccatattaatccggacctgacttaattcgttgctgacatgaccaatctcgttgactaccaaagtgtacatttggacaaagctatcaggattgccaggcaaatttcgtctttcaagtcgacgataaactaatgaaacttcttgcttaaagcgcttgattgaatcattagctacattttcagaatcataaagtccatcaacgtcagttgacatcttagcctgctctgcatcaatttcacgcaggcgatctagcatctggagccatgaatcttgaatagcagagtaaacacccttaccatctgcgatattctgtgtatcaatagtgtactgatggtacatttcattgacttctttttctaagtctttactcttttccaattcgccatgagtcaattcatagctctcatcaatatgccgcaacttttctaccagtttctttgacgcggtttgctgatgtgagatcaaagtcagcattttactttgatttttttcaacaaatggtcttgccttgtattccttagctaaaacatcatacaggtcgtcaatttcgccagagatctttttattttccttggctaattcatccaccttagtctcagctagcaatttgcgcgcaccatcaatttcatcatgaatttccttgattctgcccaaaacatctacgctagtaaggtaatatttttctgaaatcatttttttataagcatcagacaattccttaagctgatcttggaacactacttcaagctgatgataaccctcttttagcggttttaagcgtttttgtaagttacccaaagacatccgaatcttggacaaaactcgcttagcttcaacatgatcaccttgtgaagaaagattttttgcttcttcaaagtcactctccattgatgctagttgatcttcaacctgatcaatcgcagcaccatattcaaaggaattggctaagatatcttttcttaattcacgataaactttaatcaaagcatcatattgaatttgattttccttatttgattcaagtagttccgtgaaaactgccttggtgttacgagcatcttcgagcgttggcttgataatctcctgtgcttgtttaatattctttcttgctttaaacaagcgataagttgcattttcattagcagcttcttcaactagcttatgcactcgcggtaattttttcttagctgcttcagtgtagctcttgcgccaagtatttaatgtagttaaactttcgccggccaaatccattttatccagtcgcgtaatatcatcttctagatgcatcttctcaatttcagtcactgctgcatcaatcgcttcaatttcttttagttgtttacgattgatcattagcattgctgcaactacgacaatgattaggatcaccacggcaataattataatagcttgaattgatgacatagtttatcctccaaaactatcataattataacaaaacctgaccctaataggtgcaaaaagctgttctattttcttgatttattattctgaactctatataatactattcgtgtaaaatatttgcagcaataagtgacaagaacgtcaacatcttgaaacgctttagtgaacgagtaacccgcgctgcattgggcgaaaatgtaaatccaagatgcacgaatgttgaacttatgcttaatattttactccaaaaattattgtttaaattttatggaggattttttatgtcaagatatacaggtccaagttggaaacgttcaagaagattgggtatttccctttcaggtactggtaaggaaatttctcgtcgtaactacgctccaggtcaacacggtcctaacaaccgcggtcgtttgtcagaatacggtcaacaattgcacgaaaagcaaaagttacgttggatgtacggcttaaacgaacgtcaatttagaactttgttcacccgcgctggtaagattcgtgaaggtcaacacggcgttaacttcatgattttacttgaacgtcgtttggacagtcttgtttaccgtcttggtttagctactactagagaacaagctagacaattggtaaaccacggtcacattactgttgatggcaagcgtgttgacattccttcatacgaagtcaaggttggtcaaactattggcttgaaggaaaagtcaaagaacttacaacaagttaaggatgccttagaagcagttactgctcgtccatcatttgtttcatttgatgaaaacaaaatggaaggtactcttgtacgtttaccagaacgtgacgaaatggaaccagaaattgatgaagccttagttgttgaatggtacaacaagttactttaatttttacattttattttgtcgaaagtctttctcaatcgagaaaggcttttttctttgctacaataagtacataaaaagaaaggatgattagatgactgaagatttaaataaacgtgttgaacaagcagctcaaggtattactccacaaactaagcctgatgaacgccgcagatttttaggttcattacgtgagcgctgcttaatccgtatggacaatactgaagttaaaaatcctgaattaactgccctatttcttaaacatatcactgactttaagggctatactattttgatcaatggcaatatcactgatgatggcttcttgggagacattgaagccagttgcagcaaatatgatattcccttcactttagttaacaatgaaaccgcaaaaacaggaccacatgatacggcagtactagttgtagcgaaaaacgctatcaatcgaccacgaattgagctaaagcaagtttatccacctgagtttcctaaagaagaattagccgcacctaaaacaaaagaaagtttttggcataaactttttcacggagataagtaaatgaaaccattagcatatcgtatgcgaccaactaatttagacgaagttgttggtcaaaggcatctgattggtccaggcaaaattattcgccgaatggtggaagctagacttctgtcttcaatgatcctttacggccctcctggcatcggtaagacaagtattgctagtgctattgcaggctcaactaaatatgcctttagaaagctcaatgcagctactgacggcaaaaagcaattgcaacaagtagccgaagaaggcaaaatgagtgggacagttgtcttattgctggacgaaattcatcgtttggacaaaactaagcaggacttcttactgcctttgctagaatcgggacaaatcattttaattggggcaactactgagaacccttatatttcgatctcccctgctattcgttcacgttgccaaatttttgaattaaagcctctttctacagatgatgcttctcatgcaatcgatcgcgcattgaacgataaagaaaaaggtctaggcaaatataatgttgaattaacagatgatgcgcgtgctcttttgattgaaaaaggcaacggtgatttgcggtctactttgaatagtttagaattagctgttctttcaactaagcaagaattgcaagataaacaccaagatgatcaaaaaattatcatcactcaaaaagaaatggctgattcaattcaaatgaaggtgcaaaactttgatgcttctggtgatggacattacgatctagtctcagcatttcaaaaatcaattcgtggctctgatacagatgcagcgctgcactatcttgcccgattaattgaatctggtgacttagtctctatctgtcgaagactagcagtaattgcctacgaagatattggactagccgatccagacgcagctgaacacgctatagtagccatccaagctgcacaaatggttggcttgcctgaagcacgaattccactggctaatgcggttattgagttagctctttctgccaaaagcaatagtgccatttcagcaattgatgctgcactagctgatattcgaaccaaaaaagttgactcaattcccgccaacctaaaagatgctcattactctggtgccaaaaagcttggacatggcgtgaactacctttatcctcatgattatcaaaatgattgggtagcacaacaatacttgcctaataacctgcttcatgccagctactttgcacctaaaggcaattctaaaatcgaagctagatataaggcaacctatcaaaaattaaaacaaatgcagtctgataacttgcgcaataatcactaatctcgcgcattcaatatggttgacaagcacctgtaatatgcgtattataataagtgatctgagttgatcgacaagcttaaatgtataaagttgaccgatcaaactataagacgtgggagttggcaaataactaccgaatcggaatactgccttgttgcaggatccatattcgctgcgatgccagctaaaattttgaacattgcgggttcaacaagcgtcattatgctatgtttagtcaactcggatttctttagaatattaaaaaaggcggtctcaattgaccgtctttttctatagtggagactgttaaatggcaataaagattgtaatgattatttttatccttctcctactgttaacctcgtggtacatgtggcacagaaggaacggacattttttaatttatgacattggtggcgatccacgcttgagcaatattcttaagtggacttcagtcgcccttttagctgaaagtattttagggattattttgctattcatgggtaataaatatttaaatctaatcaccttattcttagcttcattaactattttggcttttggtttatcaattactcaaaataaagaataataattcactaatgacaagcaaaattttggtaaaatagaatatagaaagaggtgcttatatatgctttcacaatacaagaatattcaagttgcagttgatggttcaaaagaagctgacttggccttcagcaaggctgtagccatcgccaagcgtaaccatgcaacactagaaatcttacacgtaattgatactcgttctttccaaaatgtttcaagttttgattcagcaatggtagaacaagtttctaaagatgctgaaaagagaatgaaggattaccaagctcgtgccactaaggctggcgctgaagatgttcactactctattgaatttggttcacctaagacaatcattggacatgacttccctaagaagcacaatattgatttaatcgttgtgggtgctactggtttgaacgctgttgaacgtctgctcatcggtagtgttaccgaatacgtaaccagaacttctaaatgtgacgtcttggtatgtcgtactgaagaagttaaggatgctttgcaaggctaattatttagctttaataaccgataaaaaaatacctccaaaattcagatttgaatttttggaggatttttttaatgttatttctaaaaatcgccagccgtactgaacatgtaatcacgattatggaacttcatcgacaagattaatccaatcccaatcatgtttcccatcagagctgaaccaccctgagaaacaaatggcaatggaatacctgtcaatggcaataaatcaatattcatcccaatattttcaaatacgtggaacaagatcatcatgataacaccagttgcaatgtatgaataaaagacatttctggtatcgaacgagatttttaccatttgaataatcaggtataaataaatcaaaatcaatgctacacagccgacaaaaccaaagttttcaccaattaccgagaaaaccatgtctgatccacgaactggaacataaacgctagctttgccaaaaccattaccaaatagttgaccagaaccaatggctttcatactttgccataactgataagctcctgatgaagtatcaccagatggatcgagccaagacttaattcgttcaaattgatatgcttgaaagaaatgactcaacaatgattgcccagccgacgtagttactaatacaataaccccaatagctgctaaaatcaaaataccatataacggtacaataattttccaagaaatccctgatactaaaaccacgccaccaacgatggcaataaatactaacatagtaccaaagtcattctgtaactttagtaaaattgctaccggtgccagccaagcaataattttgcctaataacaaccaatcggtcttaatcgtgtgaccatatttatcattatgctctttgaccactcgagccaacatcaagataaaagctggcttcataatttctgaaggctgaaaagtaatcggccctagtttgaaccaacttttcgcacctgtatctgcagctacgcttctgttatataagaatagcaccgcaatcagcaaaaatattccgattccaaagaaaattggcgcaatcttaaacaactgttctgcatcaaactgcatcacaaccataataattgcaattgaaatcaagtaccataatgcctgcataactactgccctaacaggtgaaccaatatgactaggatcacctaatgcagcaacatagatacaatacaagctaattaaagccaagagtagcactggtataataatattccaggctaatcgatcgaatagacttgtttcattttcaacttttgccattaaataatcactacttatattttatttttcatgtaaggtaaagtatgaaagtaagtcattaatgctgctttcaagactgttagcaaacaaaatattgcttgtcttagaagtagtagcacgataacgcccctctaccttttcaattaaaccaatggactttctattaggaataacaacttcccacgttggcaaattctttcccttaagttcattaacttcaatatcaatattctctaattttttagacataaatcctcctacttgctatccggatgaaattttgaagcaataattggatcttcatatctctccggatgtggatttcgaaaaatagtaaaattatcaggaactggatccactccacccttgataaatgggttacaccttagtatacgacaaattcccataatcagccccaaaataggaccatgttttttcaatgcatcaatcatgtaattggagcatgttggataataccgacaacttggtggtagtaaaggtgaaatcactgtctgataaatacgtacaataaaaatcaaaatcttacgcaagtaatctcctcacttagtgtcgttgatgcttttcaatatttttaagcaaagtacctgttcctaaagcaactgcttctaatggatgatcagcaattaaaactggaacttgcaaataataagaaatcaacttatcaatattctttaatagggctccaccacctgttagcatgattccgcgatcaataatatctgctgaaagctctggtggagttgtttccaatacttctttagctgctgcaatgattgacatcaagcctggttctaaagccttttgaatctctggtgcagtaactgtagtctgcttaggcaaaccatcaactacgtcacgaccacgaacagtaatttgttcatcttggtctggttcaaaggcgctaccaatttcaatcttaatttgttcagcagttctagaaccgattaacaaattatgcttactcttaatgtaactgatgacagcctggttcatccgatcgccagcataacgtaatgattgagaagttacaatttcacccattgataaaactgcaacgtcagtggtacccccaccgatatcaatcaccatattaccttgcggtttaaaaatatccaagcctgcaccaacagccgcaactttaggttcaaagtctaaataaaccttgccgccaccagacttttcagctgcctgaataattgctttttgttcaattgaagtaactccagtaggagcacaaatcaaaatatttggcttggacataaagccttttacatttaatttttcaataaagtaagacagcattgcttcggtaatgtcaaaatcagcaattaccccattcttcaaggggcgaattactcgaatattacctggagttcttcctaccatctcatatgcctctgaaccaactgcaactaccttgtttgtatcggtatttacagctacaacagaaggttcatttaatacgatacctttaccagagacattgatcagtacgtttgctgtccccaaatcaattcctatatctcgtgccacgataaccctccataattattcaccgtccattttaccataaataatcatgactttcctttactgtccttgttttaacacaatctttaaaacaaattactcaattgcattgaagtatcgataaaagtaatgacaaaattgccaactaaaaagcctaagccaattgcaataaataaatataataattgcgtttcaaaaacatggcctttacgaataattttatctagttgaattgctttaactgcttgaaaagataagccaatcgcaatcaaatatataatgatactaataatgacatgaacgcctaattgaaacatatattttcctcaattttgacaaaaaaagacggatgcagcattttgtgcattcgtctcttccttcttctagtgacctttagtgttgtacacgctaattctgttcattgctcgtcttaaagcaacttcagcacgtgccatagtttgttcgtcatgtttttcccgtgcttccttcaaacgttgctcagcgcgttgcttcgctgcctcagcacgagaaacatcaatgtttcttgcgcgttcagcactatctgcaataatcgtagcaacattattcgaaaactcaatatagccacccgaaatcgcaatatgatcaactactgaatccatttcacggcttcgcttaatcttaacctcactaataactagtggagttaaaagtggtacgtggttatacatgattgaacgttcaccatcaacggcacgtacatcaacgatacttccacgatgtgaataaatcattccattaggagttacaacatctactttaaaaagcttctctggatctgccatttgacatcaccctacttttctagtaaagctttagcttctggatcacttggagttacacccatttcttgtgcttttttcaaaacatcttcaattgggccgacaccacgaaaggcatcttctggtaagtcatcaagatgaccatccaaaataagcttaaagcccttaatgctttccttaattggaacatatgaacctggtacaccagtaaattgttctgcaacaaagaagttttgtgacaagaagaattggaccttacgtgcacgtgcaacgatcaatttttcttcatcagacaattcatccatacctaaaacagaaataatatcctgtaattcatggtaacgttgtaaaacatgttgtactcgagtagctacttcatagtgttcttcaccaacaacttcagggtcaagggcacttgatgaagattcaagtgggtcaacagctggataaataccttgttctactaagctacgttccaagttagtagtagcatccaagtgtgcgaatgtggttgatggagctgggtcagtatagtcatcggcaggaacataaacggcttgaattgaagtaattgaacccttcttagtagaagtaattctttcctgcaattgtcccatttctgttgctaaagttggctgataaccaacggcacttggcatacgaccaagcaaagctgaaacttctgaaccagcctgagtaaaccggaagatattgtcgataaagagcaacacgtcttgaccctcaacatctctaaagtattcagcaagtgtcaaaccagttaacgcaacacgcattctggcaccaggcggctcgttcatctgaccaaataccatggccgttttacttaaaacgcctgaagctttcatttcgaagtaaaggtcgttaccttcacgagttctttcaccaacaccagtaaatacggaaataccaccatgttcttgagcaatgttgtgaattaattcctgaatgatagtagtcttaccaacaccggcaccaccgaacaaaccaactttaccaccacgtacatatggctcaagcaagtcgataaccttgataccagtttcaagaatttcacgactagtagtcaagtctgcgtacttaggtgcttccttgtggataccttcacgagggtgatcttttgaaaattctggaccaccgtcaattggttgacccaaaacgttaaacacgcgtcctaaagtatcttcaccaactggaacggaaattggaccgccagtatcttcgactttcataccacgacgaagaccatcggtagattccatggcgatcgttcttaagacaccatcaccaagctcaagtgtaacttcaaggacaatgctttcatcctctgacttaattacacgcaaggcattgttaatatcaggtaaattcttatcaattgggaatttaacatcgacaactgggccgattacttgaacgatttcaccttcactcaaaacatctacctccttttctttattactctaaggcatttgcaccactgataatttcagtaatttcagtagtaatttgtgcctgtctagcacgatttaattttgtagttaagtttgataccagatcattagcattatcagtcgcactctgcatggctgtcattgaactagcatgttcggcagtcttagcatccaaaatagcaccgtaaatagtagaacgtgcatattgtggtaacaacttcattaacacttgatttggatctggttcaatatcgtattctaattctttatgtgcttcagcttctttgacaccaatatctaaatcgacgattggtaacattttttcaacacgaaaagcagatgataatgagttaacgtggtgagtataacatacgtaaagctggtcatagacaccattcaaaaacatcttaattgcggttgaaacaattggtaaggcttcatcaaaagttggtacatccgaaacaccattcttttcataaacaacgttaatattgttctttttaaagaattgtgccgcaaccgaacctacagcaagaactttgatatcgtgtccttgagcacgttcgtcctcaaagatactcatcatattcttaatgacattgctgttataagaacctacaagaccacggtcacctgaaattaccaagaaacctgttgtcttgatattcttacgtggctgaatcatatctgccgtaatccccaaaccaaagacatcagtataatcaatttgagcaacattgttcttatcaattgagacgtctttttcacgtatattatcaactacttctgagctaattaaacgagaaatagttctacgaatatggtcgttataaacggtataacctttatcacgattttcagtttggttcaactttgaagcagagaccattctcatagcttctgtaatcttaccagtttgttttactgaagcaatttttttctttaactcaagtaaagatgcaggcatattctacctcctatttctcacttggtgtaaagctctcactgaattcttcaattgctgctgacaatttcttatcatctggcaattgaccagtttcacgaattgtcttgagcaaatcagcatgactgctgtcaaagttatcaaataattcgttttggaaacgagcaatatcttcaactggaacagcgtcaagatatccgtgagtcaaagcataaagaatcacaacttgcttttcaacaggaattggatcatgaagtggttgtttcaatacttcaacggttctttgacctctattcaacttagcttgagtagcttgatcaagatcactaccaaattgagcgaaactttcaagttcacggtaagctgcaaggtcagtacgcaaagtaccagcaaccttcttcattgccttgatctgggcgttaccaccaacacgagaaactgagttaccagcatcgatggctggacgagtaccagcaaagaacaaatcgctttgcaagaaaatctgtccatcagtaattgaaattacgttggttggaatatatgcagaaatatccccagcttcagtttgaataattggcaaagctgttaatgaaccgccgccaagtttgtcattcaacttagcactacgttcaagcaaacgtgagtgtaagtagaaaacatcacctggataagcttcacgaccaggcggacgacggagaagcaaggaaagttcacggtaagcgacggcttgtttggataggtcgtcaaatacgattaatacatccctgccattgtacataaattcctcacccatagcagtaccagcatatggtgcaatataaagcattggtgctggctcacttgggcccgcttcaacaacaatggtataatccattgcgccaaaacgctttaaagtttctacttgagttctaacggttgattccttttgaccaacagcaacgtaaatacaaattacgtcttgccccttttggttaaggatagtgtcgatggccaaactagttttaccagtcttacggtcaccgataatcaattcacgctgaccacgaccgattggaactaaggcatcgatagccttaataccagtttgaagtggttgatcaactgattgtcgatccataacccccggagccttggcttcaattggacgactcttgtcagtcttaatttcacccaaaccgtccactggttgacccaatgggttaactactctaccgattaaggcgtcaccaacaggaacttccatgattcgtccagttctttgaacacggtcaccttcacgaatattgtcaaattgacccaaaataatgatacctacatcatttgattcaaggttttgtgcaataccgtatgagccgttatcaaacttcaataactcaccggacaaaacatcgttaagtccgtgagcacgggcgataccatcaccaacataagttacaacaccaacttcgctgatgtcgagcttatcgtcgtaatgttcaagttgttgcttgatcaaggaactaatttcttccgctttaatgctcaatggtttcacctcttttaatttttatcaattatctgcgcacggatcttcttcagtttattcttaactgatccatcaatcacgcgatcttctacttgaagaaccacgccgcctaaaatacttggatcaactttattctctagacgcaccacgtttaggttatatttcttagcaaaactttcacctaaacgcttgagttgatcatcatctagcttaacagccgtagttgcaacgccagatgcgaccttcttttcattatcataaagtaagacaaagcgatcaataatatcgatcaaatcagcaaaacgatcatatttaaataacaaattcaaaaagttttgaacatcatctgaaaaatctttttcaattgcagtcaaaagatcctttttatctttactacttaaaataggatcgctcaagacactaatgatttgtggattggcttcagcagccttttttaattccaccatttcattataaacagtgtctaatgcatcattgtcttgcgcataaccaaatagtgcggcaccgtagcgtgctgcaatttcttctctacttaaagccattaatcatccaaccccttaataaattggtcgactaaatctttttggtctttagcagataaattcttagcaattactttttcagcgattgctacagaaatatcagcaacttgatcgcgtgcagaattcaaagcgtctgcttttgcctgagcggcatcttcattagcctttttgcgaattgctgcagcatcttcgtttgcatttgctacgatttctttacttgtgttttgcgcgttactcttagcgtcagagagaatttgtgttgcttcttgtcttgagttcttcaaggcagcttcacgctcattagcaagcgtttcagctttctttcgttcactagcagctgaatccaagtcatcaataactttttgccgccgcttttccatcatatctgatactggtccccaagcaaagtgcttaataagaagcatcaagatggcaaaacagatcaaataccagatagcattacctaagtaaatatgtgaggctgcaaataatgtttgaatagtcatttactgcccttctctctttaatactattcctttaaacagaaaattatctctttttattaaaggaacaaaatcaagaaggcaacaacgatagccaaaataggaacggcttcgatcaaaccaacaccaataaacattgttgctctcaagttacctgcactttcaggttgacgagccataccttcaagagtctttgaaataactttaccgttacccaatgatgcagccaaagctgctaaaccagctgcaatggatgcagcaagatatttaaaagcttctgacataaatttatacctccaaaaatttattctgtagtaaccttcttaccaatgtaaaccattgataaagttacaaaaacatatgcctggatagagccaatgaagacagagaaaccttgccaaatcatggctaatggagctgccaaaactaacgtaaatggtccaccagcatgtgctagatcattaccaattaaagttagcaaaacttcaccagcataaatattcccatatagacgtaatgataaggttaaaaagttggtaaactcttcaattaaattaattggaagcataaaaccaactggttgcgtatagctcttcaaatatccgccaacaccaaatcgttgtacgccgaatgtgaacgatagaagcaaggtcatcattgcaaacgacattgtcgctactggatcagcagttggtgatttaataaacatccaatcatcaactttgacttccatgaacatccctaattggttcataaaccaaataaacaggaataaaacaaatgcatataatgacaggtgattttgagcatccttgtcgctaacgttatctttaacaatgccgttagtgaaatcaagtaaatactcgaacacattttgtctcttattgggtttcatttcaacttttcttgaaagccaaatgcagataaataaaactgctaaaaccattagcgttgaaccgataataccagaaagttcaaaattcaagcccatgaatttaaaaacaaatgatttctccattacttcgtgacctcccttctcgtgctgaataaaactcgaacacgtaaatcatcttaacaccaaaaaaggtctttgtgtaaaatgaaagcgcattagagaaaatatttttctaaaaaggacgattacttagtaccaaatagtctgtcaccagcatcacccaaacctgggaaaatataaccattatccatcaatttgtcatcttcagcagctgcataaatgtcaacgtcaggatttgcttcttgaactgccttaataccttctggagcagctaccaaaacagcaagcttaatttccttaacaccacgcttcttcaatgcagcaatggcatcattagctgagccaccagttgcaagcattggatcaacgactaaacattcacgttcagcaatatcctttggagccttgaagaaatattcatgtggcttcaaagtcttttcgtcacggtacatcccgataacggcaatcttagctgaaggaaccatttcaaggacaccattaagcatccccataccggcacgtaaaattggcacaattgtcaacttcttaccagcaatttccttttggacagtcttacccattggtgtttcaatttcaacatcttcaagtggcaaatctctagtgatttcataggtcattaacccaccaatttcaccaacaatgcgacggaattcatttgaccccgtatccttgcgacgaataatagtcaacttgtgttgaatcaatgggtgatccaaaactacgaactttcccatatatgcctcctataaaaaataatatgatcattaaatattttaatcaaaaacgcaaagggtttaaagccctttgcgttttattttttatttattgaaatgatgtccacctgcagctttattcaatcgattcatgtaagctaaactttcttcaccttcatgaaatccttgtacataaatagtttcgatatcatcttgatcatcgaaatagcgcaagccaccaaataagttatggtcggcatcaactaaattgttgcccagatcaaatttatttgcttgaggtaaattaattttagctaagactggcgctaaagctgctacaccagttttttcattaaaatcaatttttgcaaaatcagcaggatcatcaaccacgactaccggctcacttggagcataatgacggtatttcattcctggtgccttaggtatatctttgtctgacactttgcccgtgttaattaaaactttttcacctaaaacttcgcttaactcttctggagtaatttcaccaggacgaagaacgattggtgtttctaccgataagtcgataattgtcgattctaatcccacacgagtagggccatcatcaataattccggcaatcttcccttttaaatcatggtaaacgtgctctgcagtagtaggactaggcttagttgaggtattagccgatggtcctacaattggataacccaatttagcaattaaatcatgagtcaattgatcatcaggacaacgaaatgctacagtatcaagtcccccagtaactgcatctggcagagttcctggtttaacaaacaatagcaatgtcaaaggacctggccagaaatgtttaattaatttcttagctctttctggaacttctttagcatacttagccatcatttcttcgtcagaaacagtaacgatcaatgggttatcacttggacgtcccttagcagcataaacgcccttcacagacttttctttggttgcaattgcacctagaccatagactgtctcagttggaaaagcaaccaattcacccttagctaacaacttaactgcatcattgatttgatcttttttaaaaatcttcgtttccatcattcttatttttgccaccttccatgaaccatgcgtggcttgccggccatatcttttctaaattcgatttcaaaatcaggcaattctttagcaaacaattccttcagttgttcttcttcgctaaaaccaaattctaagaaaaattctccatggctattcaaatgctcacgcacttgcttagcaaatttcttatagaagtctagaccatctttgccagcaaaaagagcttctttaggttcattttgcaagacattttcatccattacattcttttcgcttgtcttaatatacggcggattagagatgatcttatcaaattcttctaagcccaacagcacgttggctttacgagtagttacatcaagatcataagttaaaaagttttcctcacttgttcttaaggcagtatccgttacatcactagcatataaagttaaatctgtaatgccttttttctgtgcttctttagctaaagccacggtaatacagccagaaccggtacccaagtcaaggacttgatcacctgatttaagtgtctgcaatgcccattcaaccaattcttcagtttcaaaacgaggaatcaagacaccgcgttgcaccataattttatagcccaaaaaccaagcataacccaaaatatactgtggagatatgcccttagccaatttttcgatatctttattggcctgcttaatctggtcagcagttaagtccatttcttgcttcagttcaaattcacttggtgtcaagcctaagcgctctgctagaacataatcaacatcctcaggacgcgcattttcagcactctcacccgctttaatacgcatctgctttaaagtcattttaggcattttgatcagccaactcctctaattgcttagtttggttgtaaagaattaatgcatcaataatttcatcaagttcaccgttcatcacacgatcaagcttgttaatggttaagccgatgcggtgatctgttacacgattttgtggatagttatatgttctaattctttcggaacgatcaccagtaccaactgcattctttctcttagcatcgtactgagcttgattttgactttcataatagtcataaacacgtgatttcaaaatttgcattgccttttcacggttctgttgttgactacgttgatcctgcattgcaactacaatcccggttggcaagtgagtcattctaacggcactagaggtcttgttaatgtgctgaccaccggcaccacttgaacggtaaacatcaacacgaatatccttaggatcaatatcaatgtctacttgctcatattcaggcataacagcaacagtggcagttgaagtatgaacacgtccttgagattcagttactggaatccgttgaacacggtgtgcaccattttcatactttaatttcgaataaaccttgtcaccagtaatcatgattgccacacgtttatagccgccaacctcagtaggttctgaatcaatcattgaaaccttccagttttgacgttcagcatatttttcatacattctaagcaaatcgccagcaaacaaagaagcttcgtcaccaccggcagcaccacggatttccatgataatatctttatcatcgttaggatccttaggcaacatcaaaatcttgatttgatcttcaagctcgggaatttctttctcaatttcagaattttcttccttagccatttcaattaaatcaggatcagtttcactggagataatttctttattatcttcaatctcttttttgtcctctttgtacttcttatatttttgtactacttcacgcaaatcggcttcttccttagaaatctccatgtagcgcttagtatcattaataacttcaggatcggccatcatttcctgaagttcttcatagtgagctactagaccctctaattgagccataactttatccataaactaaaaatcctctctatctttcaacacctgggtgaaagtaatgatagcgacaaacaggataataactttcatcgccaccaatttgtacttgttcaccctcataaacaggcttgccattgttaattcttaaattcattgttgccttgtgtccacaataatgacaaatggtcttcatctcttctattttatcagcaaaaatcaataaattttcactaccttcaaatagatgattttgaaaatcgttttttaagccaaaggtcattactggaatattgaacacatctacaattttagcgcattctaagacatgatgtctcttcaaaaattgtgcctcatcaattaacacacaagctagtttaccatcaccatcagcaacatctgctttgttcatctttttaatataatcaaatagattcatatcagcagtaattggaattgcttctcggtgaagtccaattctagaagcaaccgttcctacaccgctacgattatccaagccactggtcattagggcaatcttgcgcccctgtgcttcataattgtgagctactttcaagatctcaattgttttgccactgctcattgcaccataacgaaaaaataattgcgccatgctggccctcccttttaacaaaaagtcttcgccttaatagtatagaggaaaaaataaatttgtgtaggtattaaacctcgttttcatcctcgctctatgctaaacttagacatagttttaaagtgagggatgtacatgagttttaaatcaggaattgctaaagttgccggtaaatcaagctattggtttttgcataatgcccttaagggcggcaccagttttccaggcaaattagcaatgaaaattgatccagaagttttaaattctttagccaaaggctatgaaactgttattgtcacgggaactaatggtaagacaatgactactgctttgattgttgaagctttaaagaaaaagtatggtgatgtgttaactaatccatctggttccaacatgcaacaaggaatcgtgaccgcttttttggctcacaagcacaagagagttaaaagaaaaatcgctgttctagaagttgatgaagcaaatgttaaaatggtaaccaaattacttcatcctagcgtctttgtattaaccaacattttccgtgatcagatggaccgttatggtgaaatctataccacttatgacaagatcgttaatggtattaaattagcacctgacgctacaattatcgctaacggagatgcaagcattttttcatcagttgaattgcctaataagaaaattttttatggctttaaacttcctgatgacaaacctgaaaatgacttcaaggctccagtcaataccgatggtgttctttgtccaaaatgcgaccacattttacattatcatgaacgtatttatgccaacttaggcgacttcttctgtcctaactgtggctaccaccgtcctgatttaacttttacagttaacaagattattgatcaaacacctaatagctcaacgttccaaatgggcaacaagcaatattccattaatattggtggtacttataacatttataatgccttagccgcctattctgttgcacgccactttggattaactgaagctgaagttgctcaagcttttgcagaaaataaacggatctttggtcgtcaagaattaattcactatggcgataaggatatcgatttaattctagttaaaaacccagttggtttggatgaagtcttgcacatgcttaatacagaaaaagatgattattcactagttgccttgcttaatgccaaccacgctgatggaattgatacttcttggatttgggatgctgattttgaaggattagacaaagaaaagattaaaaagatcctcgtcggtggtcaacgctggcatgatatgggctttagacttgaaattgctggctttgatccaggacaaatgagtactaatccagatgatgatagcctaattgaagaaattaaaaaactgccaactaagaaggtctatattctttcaacttatactgcaatgcttgcacttagaaagaagatggccgaaaagaaaatcattaaggctggtatgtaaatagaaaggattcccgcgggaatccttttttgtgtacaaaaaagctgtagctctaatgctacagcctttctaattattgggatattggggctcgaacccaaacatccaggaaccagaatcctgtgccttaccaatttggctatatcccagtaaatcacccgtacgagaattgaactcataactccaccttgagagggtagcgtcttaaccatttgaccaacgggcgaatcaacatttataattatgcttttttcttctatgcttgtcaagtaattttgactataataatgctaatggatggtgaaacatgatcgactttaataaaacacagcatttaattgaatcaatggtttttgaacgcgttgttccaggcgtcaattacacttttatcaaaaataagcaaatttttacatcaactactggttttgctagtatctacccagaagttactcagctgagcccttttgcagaatacgacctagctagtttgactaaggttttagcaacagaaaatgtcttgcttaagctttatgaccaaggcaaacttaactttactgagcccttgcagcaatttattcctgaatttaaagaccctcgtgtacgcctttatcacttgctaacccatactagtggcattcgtggctggatcccccaccgcgacaaactagatcatgatgccttactacaagcaattatcaatctgccagtaactgacgaatttgaacacaagatgcggtatgccgatacaaactttatcttacttggattagttattaaaaagatttttggcaaacctgtccaagaagtagtcacagagcaagtcctcaatcaaatgccgcttgaaaatactactttttcaccacaaaaggatgattgcgtgcctactgccctagttgatggccatgtcttgcaaggtattccacatgatcctaaagctagacaacttggaatagattgcggttctgctggcttattttccaatcttcaagacttagttaccttcgcccaaggttatttaggactaaaggatgttttaccttatagtcaaaagactgtcagccagctatttgataataaaaatccccaaggcataaaaccacgctcttggggatgggaccttcggtttgatccaaagcaaaattatccgatcattttgcacacgggttttactggtactttaattattcttgatcgcatcaaacgctctggtctaattttattgaccaatcgagtccatccgactggacacaacactgttttcttagctatgcgcgaaaaaattatccatagttttatcaacgaaaacgccaaaatataatttatagaaaaaagacggctgtgtgtcagtcgtctttttatctctcactaaatttcatcatccgtctagtattataacttattttaacgctaatgtactctgctttaaacattttccagtagctaattaaaatgattaatgccattaataaagtaaaataaaaggctgcctgactaccttgagctgtcgccagtgcataggacgctgcaccctttttcggccaaatcgacataattgctgctaagatagttgttcctacagaaccggctaattgctggctagtctgacaaactgcggttgcatcggcgcgcgatgctcctttttctaccttcaaagcttcagctagcgtgttagaaaatgacattctgtgtcctaacatcatgatgccataaataataatgatcatcatcacagtcaaatttaagccaaaaatagcaaataacaagcagctgatcgccattaagaagccacctaaataaagtggcaatttagctccttttttatcatataggctaccaaaatatggattgagtagccctgcaataatactacctggtagcaaaatcaaaccaccaactaaagatgtttgctttccgacaatttggatgtagttaggcaatacaaaactgataccaatattattaaattgcaataaaaagtaagctaacgcaccataaacaaacgctttttgcttaaatacggctagatctaacaatttcttggatgattttttagataatctaacaaataaccaaattaaaattgcagtcacaattaataaaatccacattaaaggattagcaaatccattactaatttgatttacgcctaatgtcaaagtaataaatgctatagctaaaacgataaatgatagccaatcaaaactatttttagtttgttcatgatacttaccgactacaaatagcccggcaacaaaaacaatgatcgcaaaaattgtaacaaaaccaaaaatccagcgccagttaagataaaaagtagtgataccgccaaatgctggtcctaaagtcggtgccatagctactactaagccggcgattcccatgtaaacgccccatttttcgcgaggcataacttcggttactaagttaaacatcaacggtgtacttaatcctgcacctagagctgaaatcagccgacttaacagtaaaataggaaaattaggtgctacagcactaattacgcttccaatcataaaaccaacgcaagcaacaataaacaattgccgcgcagtaaaacgttcattcaaatatgaagaacaaatcataataatcgcaatcgccaataaatatcctgttgtcgtccattgaattatatccaaaccgacaccaaattgcttcatcatcgtaggaaaagtgacgtttaaactagtttccgtcaaaattccgacaaatgacataaacgcagctgataatactgctaaaacatttttagtattctctttcacacaaaaatcctttccacaaaaaaagaaagagcaaaaaacctttgtttcctactctttctttaattagcacagctaattatattaatacgcatactatcaaatatgctgagtatatctaatattaaagacgcttagctaagtcgtcgtgtaagttttcgtaacctggcttgttaagtaaaccaaacatgttacgcttgtaagcttcaacacctggttggttgaatgggttaataccgttcaagtaacctgaaatagcaattgctaattcgaagaagtaaatcatgtaacctaaagtatgtgcactttggtctggaatgttaacagtcataactggaacaccaccatcggtgtgagccaaaacaacaccttcataagcacgatcgtttacgtagttcaagctcttaccttccaagaagttaagttggtcaaggttcttttcatcgcctgggatcttaacatcatgacgtggattttcaacacggataacagtttcaaataaattacgtaaaccttcttggatgtattgaccaagtgagtgaaggtcagtagtgaagttagcgcttgatgggtaaatacctttttgatccttaccttctgattcacccattaattgcttgcaccattcaccgaacattcttaaacttggttcatagttttcaacaatttcagtagtgtaacccttacggtaaaggatgttacgaagtgctgcgtattggtatggagttgcctttgacaaatcagtatcagtgtagtcagcacgtgcgtctgcagcacccttcatcaattcgtcaatgtcagcacctgaagcagcgattggaagtaaaccaacagctgaaagaacactgtaacgaccaccaacatcatcaggaactacaaattcttcgtaaccttctgcatcagcttcagtctttaaagcacccttttgacggtcagtagttgcataaattctcttagcagcttcttccttaccatacttcttgattaacttgtccttgaagattctgaaggctactgatggttcagtagtagtacctgacttagaaattacgttaacactgaagtccttgtcgcctaaccattcaatcaagtcataaaggtatgagcctgaaagtgagttaccacagaagacaacagttggcataccgttcttttccttgccatagaaattgctgttcaagaattcaattgcagcttgggcaccaaggtaagaaccaccgataccaatacaaatcaaaacttctgaatctgattgaatcttcttggctgccttcttaatgcgggcaaattcatccttgtcatagtcaactggcaaattaagccaaccacggaaatcgttacctgcaccagttccatcgcgaagttcagtattagcagcgttaaccatagcttgcatttcgcttaattcattttcatgaacaaattgtgttagtttactactatcaaatttaattaaactcataaatctgcttcctaactaaataaaatatttttcacaaacctattttaacaatcttgatttataaataccagtacattataagcgcattcaggcttttttgacaattttaaaaatcacataacccaaaattgctccacaagtattgaagaaaacatcatcaatatcgctaacccccgtcaccagcaaaaactgcagagtctcaattcccactgaaaacagcatccccatcagtaccgtccttaaaaacgttgctctttttgaaaaaacaatggggaaaaaaatgccaaacggcacaaagcacaagacattgccaaaagaattataaaagaaatccaaatgactgggagcatagactaatttccaagtttccttcatgaataccaagttaatatcactcaatggcctagagaaattaaaatcaagctgccacggaaagtaggtatttctaaaagttgtcagcatcaaaactaagattatgtaaaaagaaaagacccaaacgctagcttcagacctaattgatcttctgcggcgcaccaaaagaagccaaattaagcgcaatacagcaaaaattaaaaaataaaatattgttttatccagcgctaataaggttaatttaactaatgcaaagtggttaatattagttgcatactgtttagctaaaaaactataaagtgggcccaaaaatagcatactttgcctctttccaaaatattcattatagattatacctattttcacggctggaaaatcttaaaaaaaagataactcttagcaaattattgttttaaaagaggtgaaccattaaaattaaaagatgttaaaggagcattatatggaaaaaaagaaaattatcagttttattcaaacacgaacgggctttttaacccttttagttgtttgtttctggctgaaatatatttttgcagcttattttgatttcaatttaggcttgagcgacccgtatcaacatttcattatgtggctcagccccgtagggtccgccatcattttaatcagcttcggtttttatattcctaaaccgctgatctcttacatcacaatgttaattttagactttgccaatacggcattgctttttgcaaatattatctactatcgtcaattttcggactttttaacaattaaaacgatgtctaacgttggtaaagtttcgcagggtctaggtaaaagtaccgttgcccttctgcatccaacagatattattatctggattgatttgatcgttattgttactttactgatcattcataaaatcaaaattgatcaaagatcttacggcttatccaccccatttgcgattacctcagtaggcgcatttgtcctaactcttaacatttttttggcagaaacctctcgtccgcgcttattgcgcaacacttttgatcgctcctatgtcgttaaataccttggtattgacacctttactgcttatgattgcttcaagagtgcgcaaaatgttcaagtcactaaaaatgccaacgctgcggacttgaaccagattttaacttttaccaaaaaacaaaatgctgctccatcttcctcatattttggtattgagaaaaaacgcaatgtgattatcatccacttagaaagtttccagcaatttttaattaatcttaaggttaatggcaaagaagtgacgccgttcctaaattcactttatcaaaataaacatacgctcagttttaacaacttctaccaccaagttggtctaggtagaaccagtgacgcggaaaacatgctagaaactagtacttacggtattcccgacggatctttattcacttctttaggttcggaaaacacctttcaagctgcaccgcaaattttgcgtcaagatggctatacttccgctgtctttcacggcaacgtcggtagtttttggaatcgaaatgatgtttataaaaatatgggctataattatttctttgataaaaattactatagctcccaaagtaaagatgcaagcggctatgggttaaaagataagctgctttttgccgaaagcgttaaatatttagagcagatgcagcagcctttctatgctaagttcattacggtaaccaaccacattccgtttaacttagataaagaagacaaggaccctaactttaagactacaaacactgccgaccaaactatcaacaattactttgaaactgcccactacctagatgaggcattgcgtgaatttttccactacttaaagtcttctggtctttacaaaaactcaatggtagtcatttatggtgatcactatgggttaagtaattctgaaaatgaaaccttagcaccaattattggtgaaagctctgacacgtggaatacttacaataatgttcaaatgcagcgtgttccattcatgattcatgccaataatttgaaaggaaaaattaatcatgaaattgctggtgaaattgatgtcttgccaacactgatgcatttgctcggtattaacaataaaaactatgtccaattcggtagcgacatgctttcgcctaaaagacaaaattggatcgtctttcgtaatgggaccattgtcagctccagatatatcatagttggtgctaaaggaatcaaaggtaccgtttatgaccgagttagcggtaaacaaatcattaattttactcctcaagagaaaaaagaaatctctgagctagcacaaaaggccaaggcatcattagactattctgacttattaaacaaccacaatttgttacgcttctacaccccaactggctttgtccctgctgatccaacccaatttgattattccgtcaattatcaaaaaatgatcgctatcagaaatgaattagctggcaattccacctcgctttatagcagacatcgcggtacaactactaatctttaccgtactgatgccgctgaactaaaagatagaaaacaagaaattacccaagttcctgacagcgttaaaaatattaaagagaatacgaaaaacaaaaatagttcagaaaataccaataactaaaaagaacgcacagacctttcaaaaaaactgtgcgttcttttttagtttttagctacaaactgttcatagcccttgtcataaaaggtcacggtgaatgtggaacctttacctggtgcggaaaatacttctactttgccaccatgttgcttaatcaaagaagaaacaatcgcaagtcccaagcctgattcgccagttcccattcgagcacgcgatggatcagccttgaaaaagcgttcaaaaatatacttagtctgattcttgctcatgccaataccattatccttaaccgataattgtgttccatgctctatccgtttacccgaaataataattttgccatcatgagtgaattgaatcgcattttgaactaagttaaccattacctgggtaaaacggtcacgatctgcataaataggcaactgatcaggtgcctctacaaccagctcatcgttggctttagttgcattttgttttaattgcgacttcaaatcatgcagaataattgtggcattaaagttagtcttaaccagcataatttgattatttcgaatcttttcatagtccaaattttcattgactaaccgaattaatcgtttagtttcgcgctgcattaacgcgattgacttcggtttagaatcctctgggatagcatcgtattgcaagccctctagaatgccattaattgttgtcaatggcgtccgcatttcatgagcagcatcagccatgaattggtctcgtcgctcttcttgagccttaacctcttcgttcgactgcttcaaagcctgcaccattttattgaaattctcagccaattgatcaatttcatcgctatctttatgctcaatttgcacattaaagttacctgatgcaactttttgcgtagcacgtgataatcgcttaattcgtttagttgaataataagaaataataaagctcagcaacaatccaaccgctacagtaattaacaatgcacgcaacaaattgcgtttagccattaaaatcggtcgctcaacatgctttactctcgatcctatccaaacaatgccaacaagatttttgccattcatccatggaaccaaaacccccgtgtaggcatccttagttgaactaatcggtgaattttcattatgattattttgaattctaatctcttgcccattttttaaagtagtaaaaacttcttgtgaaagctgaattctagcctttgttttgggataaatctgctcatttttatcattaaaaatacgtaaatgagcatcatcaccacgaagaacatattctaattgattcaagaagttattgctaagcaatgcagtcccattttggctatcagcttccgccaagtttcccaaagaattagcatagctttccatccgctggtagttttgcgtataagcttgattacgcgcataaccaatctctgagtaaccaataatcgagatagttgtcacaataatgagtaagaaactcaacatattttggtaaattaatttcattatttgacctgcgaatcatcaaacttgtaaccgacgccccaaacagtttggatcaccttggcaccaaccttctctaatttctgtcgaagctttttaatatgagcatcaacagttctttcttcaccataatactcatagccccaaactagttctagtaattggtcacgagaaaagacttgtttaggcttttgtgccattgtatacagcaaatcaaattcttttggtgtcaaacccattaccggctgattatcaaataaaacttctcgtctattttttgaaatcttcaaatgatcggtcgtaatctcatagtcttgattatcttcttgagtatgagctggttcttcttccatcatcacgcggcgatgcaaagccttaatgcgggcaatcaaagcaattgggctaaatggcttagtgacatactcatcagctccgatacctagccccaacacttgatctgattcactgccacgagcagtaagcataataattggcactgtcggcgaaattgcccgtacctctttagctacttgaatcccatctttttttggcaaattcaaatctaacgtaatcagatcatacttatccgcgttctttttaaacatatcgacggcttcgacaccatcaacagcaatgtcttgttgccaaccttcttttttgaaaaacattcccatcatttcagctacggaagtgtcatcttcgaccattaatattctcaaactcattatcaatccctaaatccttttgttctcttatgcttcacttgatcaggatcgacatagtcatgtggcaattcatgtcgtttagacaaaaatgttttcaaacttttttcggtataaacaattggcaataagataaataaataaaatgttaacagccaaatgagaaaatagcgatcccaattcaaatagtgaatgattactcctaacagtgcttgaataaacccaaacaggatacaataccagcttgcccgtttctgagcaaacttaaaactatcctggttaacttgcgcaagataagataaatagccataaattcggttgggccttttggctggcgtaatcagccaaatcaaccctaccgccaccataactaagccacaagcgacatagatcacgatttctcactcctaattctgataaatttaaacggttattcctcacctggtgcagacataactattctcattttaccagtgaaagtgaaattcttcatctcatttggaataattaaattagttcccatcttcaaatcatatgacttgccatcagcttctaattttccttcgcctttgataacggaaactaacaggtatggatgatcctttaagccggtcttccaagtaccatcaaggtcaatttgccacaaataaaagtgtggtgaaagtggtggttcaaccaatgtcttaatttctgcatcttgatcttggctagtcttaacatctaacttaggatcaacatggggaacagtggtcacatcaattgacttttgcgtatgaagctcacgctttttaccatccttgcccacacgatcgtagtcatacaagcggtaagttacatcacttgactgttgagtttcaattactaagcatcccttagttaaagcatgaattgtacctgctggcacatagaagaaatcgcctgctttaaccggaacttttctgagcagcttatcccattcgcctttgtggatcatatcagctaattcttcacggctttttgcatgatgaccataaataatataagcacctggatcagcttgcattacataccaagactcagtcttaccagaatcattttctactttgcgagcataatcatcatccgggtgtacttgaactgataaattatcattagcatctaggaattttaccaataatggaaattccttggccttagggttgccaaacaattccggatgcttcaagtaaacatcccgcaatgacattcccttaagtggcccatctgttacagttgacgcgtcatccttgtaacctgaaataatccaagcttctccaacttttccttctggaatatcatagtgaaaaatatcatctaatttacgtccaccccaaatttttggcctaaagtatggggttaaaaataatggttccatttaaatcacctcaattaaagtataaactttaaggcagaataaatgaaacccttttcttagatatatgtatactatttgttttacatgtaaagctacttgttatacttacgaatacctgtagctaatctttgcatcccatccttgaccatcgtcaaaggacaagctagattaattcgaataaaatcatggccatttccacgataaacactaccagctgaaataatcagcccagtttcttggcgaatgaactctgctaattcctgtgaatcagtactgatcttttgcacatcgatccacatcaaatatgtcgcattgcccgaaatgatttgtacttcaggaatgtttttttcaataaaattctgcacatacgcaaaattttgctttaactgttttttcaaagcattaagccaatcatggccttgctcataagccgcaatcgttgctggaatcgccaataaattaggctcggctacttcatcactatttaaaccgcggttaaccatattgcgcaaattttcattaggaacaattgccgtagcagaatgaagagcagcaacattaaaagttttgcttggggacactagtgaaatcacactattttgtgcttcacctgttacagaaaaggctggcgtgtaatctggaccttgtctaaccaaatcaccatggatctcatccgatagtaatgttacatggtattggtgacaaagatccgcaattttttgtacttcttcactagtccaaacttttcctactggattatgtgggttacaaaaaatcatcaaagtcgttagcggctcagctaatttttgttccaagtctgcccagttgatcgaataacttttaccatcgaaagctaaatcactcgacaaaacatggcgcccattattcaaaatggaattataaaaaatattataaactggctcttgtactaaaacattatcaccaatatgtgaaatacggcgtacaattgatgaaatagcagggactactccagtagtaaaaatcatccaatttgtttgtggccgatgattatgttctgtttcataccaatcagcgacagcattaaaataatctgcttgtgggaactcataaccaaatgcacctaatgtcaatttttgttgcattgcctcgataatttcaggtgccgtcttaaagtccatatcggcaatccacattggtaattcatcagacttcacatcccactttactgaatcagtctttgacctatctggtgcattttcaaaatcatattgcatatatctcactaatcctttggtgtttggttcgtatcagaatgaacaatttttgtacctattttcggacaatcaagctcggttttagatggatctaccttatctggatcgataatcaaagtaccaatctcaggtaccgtaattttaccagaaattgggtttttaatactatcaatctttgtattaagctccacatctaaattagaaacatattcaaaagctaaatctgtatgaatcaaggaaccattcttaatctcaagctgatcaatgtagttcaagccctgatcactttcaattttacaattaattaacgtaatgttgttagtattccaagctaaatattcaccatcaataattgaatcgtaaatagtgacattattgcaattccaaaaagcatctttagagataaaagttgaattatgaacttcaatgttttctgcaccatcaaaaacataatttcccacaacggaaacgtgatcaagataaatattctggctatctttaccaaaataatcaccattaatttgagaattggtaatcttaatatcattacaagtccacattgtttcttctgcgttagcaaaatgaacattatctaaaataatatgaattgtccttctgaataatttaggtgcctgtaaagcactatttttaattgaaatattcttggtataccaaattccagaccgtgacatagtttcaaacgtggtattttcaactttcacattttcatcataccaaagtggatatttccatttaaaaattgaattctttaatctgatatttttagcttcttttaagggagattcaccactgccaaatgtaataccatcaaggattgcatcagttaatccataaagaattctttcacctgcaaaatatttatttttgtattccataattgtttccacctttttgttaatttaataatcattaattttaggacagtattcattatatgatttctttcatgcaatgtttaatacttatttttagtgataatgcataacaaaaatgcatagcagataaacgatttagcaaaacaaaaaaccgctctagaacaacatctagaacggttatctatggagatgaggggagctatctctacttttagttatttccaattacttctaagcaccaaagttaagccattttgatgttggttgattttagttaattttgaagttggatacctttttggatacctgataattttgacaataaaattaaaagcctatatactaaattttgtcaggttagtatataggcttcgtttttgtgtcactagattttgtcgctagtgacttttttattcttcaaattcataagaatctgaaatagcatttataacatcttttataaaagatgcaggtgcatgatccactttgtaccagtgtcgtgcagctaagtctaaagttgtttcctgctgtgcttctgcaactccatggacttttaagccttcaggaactggaatatgtagcggaaaatcattttctgttctactaatcagtactactttcacaagtgatctagttaacctagtaaagtcatgattagatacaattaaagcaggtctagttccttgttgctcatgtcctaaacttggatcaaaaccaataatgataatgtcaccttgatgaacatcaatcattttttcccccctttctatattttaggtgactttcttaccatttaatttctttacctacagacttgccccaatcaacttctttggattcaccaggatgttcattatcccatttatcccaatatgcttcataatcaaagccctcaaagcgttgtgctagcttgctctctttttttcttttcaaaattaattctttattcttaacttttacctcaaaagtagctttttcagtagtaattccaagatctttgagtagtgacttagaaagtctaataccttgggaattaccccatttttgcaatgtaatctccataagaaaacctccaaaaattacttattctttactaagtatataccagcggatatacttagtaaaggataaagtagtaaaaatcagttttattgttagaatctttatctcagcataactacaataaaaagccatcctatgagtcttgatttctaggatggctttttacaataatacatatcattaaatatacgctacatatatttaaatgatcaatatagtctgcttaatcttcttatttcatttccaactttccttccaaaatcacatcattcaagaaactagaagatgaactatatccatgttcttttgcaatctctgtcaatttagttcttgcacttggtctcaagctaaaggtgtaaggtcttctcttttctctcttaatgtaattacttgattctttagaaggtgcttccttactagactcttcactaactctagaagtttctttcaatacttctgcaaactttcttccttgatttgggttaaaactcatttaaaaatcctcctaattattcctacactgtacctaacttcttggtacctaaaacaacatatcctggtacttgtttaaaagtggtcttgtatgtgatcaagcaatgaatctctcgtcctgtgtaatttgcggttgttggattatactcttccagcaatagcaaatctcctacctgataattacgatcattttttctaatttcaaaatttttagagttatttacttgtgcctcaaaataacttggaagaatttttactcgatgttctttgatctcatatacgccacttgatgtatatactttcattagcattacctcatattttatttatacattacgtatacttagtttatatttaatgtatatttgctttatacattatttgtaatggagccaaagataccatttaactcattgaaaaatgatccatacctagattgcatttttttatctttcatcattgtactgattgccactttatctaaagtggagcggttaaacagctctcgattgggaatcttaacaatgacacttggatctttttgtaaaacttctaccaattcacgagaagatctagtgttgtttttaatcatgtttccaacaaatagcaattttgcatctactaacgactgtctcgtacgataatcgattgtttctcgtttaagctccttaaagcgctgctctaagttgaatttggcactataaccgtgttcgctcggagtaatagggctaagaatatcatcactaataatcactgcgttctttgtcgcaattgaaaaatcagggtggcaatcaataataatgtaatcgtattgatctagttttctagtgtcataattatctgctagccacatgtatagcagcatatttttatcgactttagtttcaatgtctgcttcaatatcgtctaaatgcatatctcctgcaattagatcaatattttcattaatctgatggattttaacttgatcattctttaagaaaatatttcctactgtatactcattatcataaattcgatatgtttgggtcaaattagattgatggtctaagtcgataaacaaaatccgtgatccgtggttagccaaccattcgccatagttataggctaatgtggttttacctactccacctttaatagctgcaaaagtaataatcttcattttcttctcctttaattatactgtactcatacgttatgtataatttacttatgcttaatttaaactggtaacgcagcaaagaaacctgttgaaactaggtatgccgaaacagcaattactactacctgtgttactaacatccaacccacaaagcttttatcaaacttgttagccttatgcttagaaatagtattcataattgttccctccatattcatatgctatgtataagttatttatgtttaacttatatttatattatatatcatatttataatatttcaacaactatcgtttttatttttataagaattcaagtgtaaaattaaaaaagataaaattgctgttttctaacaccttctattttttaagctttatttgtaccataatgacatcatttgtatgttataatgatgtcatagcgtaaaggagtgattgttatgacatcatcaactacaatccgtcttgatgacgatttaaagagaaaaatgcaaaagaatttagatgctgcaggcctttcaatgaatgcatactttgtaatggcagctaaacaactggttttacaaaaaaaagttccttttgaaatcttgactgaaccagaaattcctaataaaacaaccgaaaaagcaatgcttctagctgatgccaaagatgagggcttggttacagatgattcgcctagttttactaatgtcaatgatttaatgaaatctttggatgagaactaatgtacactatcaaatacgagccacaatttaaaaaagactacaaaaagttcaaaaaagaacatccagagttaataaaagattttaagaatacagttattcagttaacccaaaaaggaaaagtcggaaaggactatgaccttcatccgttagataaacgtggtggtaattacagtggtcattttgattatcatttaagtgaaggaacggtcgatgttgtagtgatctacaagccacacaagaccaattcaataattagatttgtgagaatcggaaatcatggagacctatttgagggtaaagaaaaataaactatataaatacggatatatcagtatttttgatatatccgtattttgatatacgaattagaaatttagattttattctttttaaaactccgctcaccatgttgaaaaatcgataaaaacaatgctaaatgtagaaaaaagaaaaaatcatagtagtaagactttaaaaaggacggtagaactactttaagtactacaaattacaacaaaaattttataaacttctacttcattaagaaaaaatcctgtaatacagggctttttaagctaaaacgcaacttttacattttattaattagtgattcagtagttaaaatttctctatccttatactttacagcctcagcaatcgtcagtttttcaattgctctaatgtacttctccatgtaattaaagtctaaattttttgtattacttacaactggtaatcttacactatcacttcttattttggcttttgaaatggagtcatcccaactatattttttagataaagcttttctaacacttcctacaaaatattgttgaattagagggcttttatatcttgaatctttaaaatatagtgccaaattatgactatcattcgaacaaaaatctttttcttgataagttactaccatagtttttccaccaatgaaaacgcaattgccctcatcgatccattctttaggacaatttatgtattttaaaacagcattattgccttctgctgctgtcaagtatggcacattgccattttcaaggttagctacttgactcttcaatatactatgagtattaactacattaaatagatcaactattttaaattcttgaaatattggcttatatgctaatattttcttgtcttcatcagttagtccatagtcatttaatcctgtagcttttaaataggaatcaagctcggcgagccgttgctgttcaagctcggcgagccgttgctgttcaagctcggctatatattgttccatataattaaaatctatttcatctgcatcagttacaggtagcctcaccttagagtctctaaacacattatccacgtgtctaacaagaacagacagtaacaccttagacaatctactaaaaatggtattaaagtacaacgcaattttagtattaagtttaaatttgggaataattttccttacgaactgtcctgcataccaagaacgttctcgataaaagaaagtcatttgtaacagccccaaactaaacgtattaggttcattgtaggggacatcacatacaaagtctgttgtgctttcaatgccattattcaaagatgttcgggtaacatagtcatattcatttgtacttatattaggatttactaatttagacttgttgataccttttaccttttgtatttcaaataaatcacctaacttaaattccttatacttaaccattctgaccacctataacttgactaaccttccacgatagataatctgccacagtccttttaaagtcctcttctgcaggtgttgtgtcaatttttaaatgctggttataagtccaatcattgccttctagagtgattgtatctttaattactttatggtttcgttcagtatagtaattcgttttaggctttttatcactaacaattgcaactacttcttcataacgttctttggcatgatctgtatcacgtaaattaaccttctgaccagattttttacggttcattctagtatatccatcttcactaaaatctaagaaggttactaaatcatcttcttcatgtggtctagctactttaaatacataaatagcagtctgaacactagcttttccaccaaataaatcagttggcatatgaatagaggcaactaaagtattatttttaagaatattttttgtgtaaggcagcccgttgccactaccagcgttttcttgaataataattgccgcatagccttttgtcatttgtgacaatgcttcttgaacaaaaataaaaccttttccttctgcagagtatggaggatttagcaaaaacacatttgctggaaactgtgtgtaatttttatacagctcatgactattaccattaaccatattgctagatccatctcccattaggatcatgtttaaaacggctaaaatgtaaatattgcccagtatttctacacccagtaattgattttctttaatattttgaatcttgcactctagtttctgtttatcttgaattgtatttttagcatccttaaccataatatccattgcagacactaaaaatcctgcagatcccattgccaaatcccacacaaacgaatctttatttgtatgagctaacctagccatcatattcgttatgtatcttggtgttaaaaccacatcattttgacggtcattatcaattgatacccaatcatttagagagttcaaaattttaccagtaaaatctaaatgcaaatttgattcaagcaaaggaagtatatcattatagacttgcacatatatcttatgaatcaaactttcaccatttttaggttgccataaagcttgtttagtaaaaataggttgtaacaaagccataatcatgttaattttgctattttccgcttttcttgcatttaggaaatctgcaatatgatttaagataatttgtccatcattgtttctttcagttatgtttccttttaattcagcaggctctaactgtgatactccttttgtctgtagccccgccatgattaaaccagtaaaaacatacaatttttcattagttgtcagtaggttttgaattgacttatcgtcgtacaaagcttgatgaattgattttatccttttttctaattcatcctcagtttctaatttaattttttcgagttcacggtcatttagatttagtttgtctaatatgccaaaaagggtatctatattgatttgcttaaacaaatcaaacgatgaatctagctgtctaatatgttttggaacaccagcattagccttagaaatataataagctttctgctcaggatcttttaaattgccttcagcatctaaagtagtcccgttaattccaattataataacttcatcacagtctgagttatctaagatcgcatttccataatgcagagcaccattagtagcatatgtagtaattgcactataattaggatcaccttttttatgtggattttttgcgttcggcttagaatctgaaccaaatttagtcacttgaacaatttgaccagccttgtctaatttttctaacttatttttgccacctttagcttcaatcattactggtactcttcgtgaatgattatcttctaataataattgaatatcaggataattgttgcctgcaccaccagatttagattcagcttgtcgcaaggctgatgtaatttcactatttatttctccagttttaccgtaatgcctaattcctagactatcaagttcactcttaaagtattcttctactttttcttcaattgatctaaccattttattctcctgttcaattcttgcaatggttgattgagttgtatgtaactttttagctgattctgtttggtgttagtcctgcgtttcttcaattaatttatctatttacaatttatgcaaaaacagggtattcattataattagccttaacccagctaataacttgattcatcaagctcgtcattgcatcattaagcgaattttgggtattaatccagtcttgtttaatttctttagcttcattatcatcaagtcctacaacttcaggatcatttaccaagctatttaaattatcagtttcttttttatatctcagaagctctgacttatttagattaaattttatgagataagtcatcaacatcgattcatcaagaccaatatcatttcttcctgcgccaatcgtagtaagtccttgatccacaattaactgaatatcaccatttttacgttttaaaattaaggaaaaagatatgtcgctatcaataccacgccaatattttgtttgatagcttttacttaatttaagaacaggttcatccacctgtgcaatatcatcatatagtgctaatctcaattcatccatctatgtatttcctttcttacatgttatttagattatctatctaataccctttttatgggcaattccactaactataggattttactttttttattatatagcatgtcaacaatagtttgccatactaaatggtttttaggatcttaggcatttggtctttatttaaaactaaatttgtgattcctattggaaagtcgtcagaaagagcactaagtgtagaaaaaaatcatggtaatatgaaggtacaaaagaagaaacatcttgcatatgcgagaatattaagacacacaaaaatcgctactctgtagtccacaaatgagtaacgatttttttgtttcaccaaagtttaagacaaaaaagccccggatttaaaattgaagtgcaacactaagtgttaaacaaaaaggccatgaagacctaaacttgaagtgacgaaaaatcaagaaaggaagatcttcatgaccaattcaaattctagcatttctaagcactatcatcaattaaccagcgtacaacgtggacaaattcaagcaatgctggattccggcataacttcccgtactgttatcgctcaagaagttggctgccataagtcgacaatcagtcgcgaaatcaaacgcggaagcgtcctgcaaagagacagcagctatttattgtatgagcactattacgctgatactgcacagatttattatgagaagcgtcgcaaaaactgctatcagcgcaatccattgaagcattatgctgtctttttgagaatgctctccagacgctttaaagctaaatttgatgccaccagcatcgatgagttcgttggtgaattcaaaaggactatgccaggctacccttgtcccagcacaccaaccgtctatcgctatattgatcagggcttgctggacataagcaatattgatctgcctatgaagctcaaaagacgcaggaacaagcgtcatcacagccatggcggtcacgctttgcacaagaagcatcttggcaattccattgaacagcgtcctaaggaggttgaagacagaaaagctccgctgcactgggaaggagatctggttaaaggcgtcagacgcaagaatcagcctgctttaatgactttgactgaaagaaccacacgctttgaagtagttatcaagattcctgactatcgggcaagcacatgccaaaggctgcttcaaaaggagattgacagacatcctgcctggtttaaatcaatcacgtttgacaatggctctgagtttgcggatatgaccaagatcaagggctgccagatttactttgctcacccatattctccatgggaaaggggcaccaatgagaactgcaatggtcttttgcgtcaattcttccctaagggcaagagcatgaaagacaagtcaaaagcttatgttcaacaggcaactgatgccattaaccacaaatatcgccgaatcctccaatatcacacagcagaggaactcttcaagcaatatatctcttcataacctaactgttgcacttaatttgacaattcaggaagacaaaaaagctatatgcattggctaaggatagtgacgcttgtgatgttttcttgagttttgcttatggattttacgcctatggctattttgagcaaaaattcaacttttacattttattaattctaattgctaatatacttacttaatcttgacgcaatgcacctttaaccaatctgcagcaaaatacatattctcttctgaatcctcactattagtgatatataaaataaactttaatgcatcgtctttatcagcttttaagtgatatccattttcttgtaaaaaaaacgccgctgcataataggaagtccgtttatttccatcagcgaagatatgctttttagtaatcttctgtaagataaaagccgcttttaaccataatgttggatataattcacgtccaaataatatttgttgtggctgtttaacaacaacgtctagcccctctggatactgcacacctacagtacctttaccagctttttcaagcaaccgttgattcaaatggattaaatctgttttggttaaatagatcatttattctctaactctcgtgttaattctttattttcttcataaaattgatcaataaagtggtccaaatcaggattaattgaatcaactattttaaacgtgatcttcttaccattaggatcatattctttttcaagaactgttccatcttctacatgaaacttagttaaatcttgcttggttaaacgtacactcaatgaattaccagctttaaaaactttagttgtatcttgtaacattttaatcacctgctttgccatttaattgttataacgcaataatatgatgttataacgtgaatgtcaatattttaactttttttatcatatagcatgtcaacaatagtttgccatactaaatggtttttaggatcttaggcatttggtctttatttaaaactaaatttgtgaatcctattggaaagtcgtcagaaagagcactaagtgtagaaaaaaattatggtaatatgaaggtacaaaagaagaaacatcttgcatatgcgagaaaattaagacacacaaaaatcgctactctaagtccacaaatgagtaacgattttttgtttcaccaaagtttagagcaaatatgcttaatgctttagctgtatgttatcacgaaatcaagtggctatatcattagacgctttgttctaatcttaagcgaatgaagcatccattttatattctcatccaccagcttataatggctttcaattaaaagagcttttgcggctttttcatactcgtctttcttcatatactttctcctataaactgcttatcaagaacacggctaaattattgccaaggtgacttacgtaagagaaggtcaaatccttcgtttcaatataaactaaagctaagacagacccacatagcgagtacaaaatggtatataaatcaatttgtggttcatgtaagagtccaaaaattaatccattaatgagaacagcaataaacaatgttgattttttgcctggtttactaaaaaaccaattgaaaaaaatacctctaaaaataatttcttcaaaaagtggtccaattgcaatcagcattacattaataattggattcaactgttgctgatgtgcagctatgtttgcttgattagtggcttcccctttaatcaaaaatcctgctaaaatttgcaaaatacaaattactaaaaatccaagaaaagctaaactccaattttttaaagtaaatcttggcattctagttttattgtaactagtaaagtgccaatcattcacctgattaagtcttctttggtaaattccgtaggtcaagctcagtaatgcaaccgttaatccaaatataaatataacggcaacccagcttaattgtttggctctaatcataaataatccttgaactaccgcataaataaggaaagttactatcatttgaccaataccaattgatttatcaagaatcttttttttcatcttttagttcctttgatttttttatgtctgattttagataccctatcgacaagagaaaaatataaattattactgaaataccaaagccgaccgtcgcaaaattaatattggaatttaaatgcttcgtagaaaccttgcaaattgattgcgccaaagcacctgcgttagcagaaacaaaaaatgcaaacatagttgcaataaacagtgctgttcgtcttagaaaggacaaaatcatatttattttcataaactacctctacttagcaaatttctcatcaaaaccaaaatattttctgccattgtatttcttattgggattaggcttaatctccattcgataggtacctttacgaccattgaaagctacaatttgcttttttcctgccgcaattttcttaatctcttcaggggtccaacgatgacctcgatatgttttcttaaaatgatattctttaccgtctttatatgtaatcactacatagacatttgtatctacaggtttaggattaactctaaagccccagaacctgattttacgtctaccttctttcaattcttgttctatcaattttccagtagccgtaaagctttttccttgcttatcagtcgcttcaaaactgatttcttcacctgccaacaagctggtaatttcttcctcactaaaagcatgttgtccatattcttttttaaatttaatctctttagctaaaggcttatagattcctttaacgtgatcagtatcttcaggaaactctactttccaaccaactctggtaatctctttacccgtttttttacttttatacgtttgttcggctaaataagccgtatgttgttcttctttaccaaatttttcaatcgaataggtgatttgtttcccttctaaagcttcttgttgctccacttcagtagtcgtatgtccatcaaaaatcgtaactggtgggtttactgtttcatttgtttgagtaaagactccgctaaatctttcaattgcctttaaatcaccagctaattctttaacttgtgcatcttgatttaataatggggcattttctatcataactgctttatcatgttcaattgtcttttctgcaactgagtagaccatatcttgctttgtgggatcagccttaatttcattcaaaatgtcttgcaagcgttttgtaatttttcctgaagacaaataggtatctttagctaagcaagcaatcaatgcgccagttcctgttacttcaaaaacacctcttactacttttaattggggaataacttttttattttctttaccaattgcttgtaatttactaattgtttgcattttagtcgcaccagtacccaagttccatttatccaagttattcaaaatgaaagttaaagtaggtttagttggtggcgtatttgtaccttgatatacttcagggctagcgttttgagcaaaatgtgtagccttattttctgattgcttttcttcatttaaatcattttcgttaaaaatcagcttatagtttagttccttaggaacattaatcgtacttgtaaaatcaggatgatttgcaatatgggctttaacttgagtatatacatagtcctcagctaacattgctagatatgatttaacaactcgttcataaatatctcgaccacatttaccatatttgtcttcaactttttcaagtgattgtggtactaatttggtcggacgattggctccgtgatcctcactcttaattatgaattttttgcgtgggtctttatgacttaagagttttgaatcaattccaacgactgctgcaattttatctgcatatggtagtaactcgttaaaatcatcaatcgtaattgcgttgtcttctgttctcggataagaaacaatcttatcatcatacattttttgataagtatcagtaatttgttcagttgtatattccttttggaaaatcttacctaagtcagccaagttgactaactttggcggctgggttcttttttcagttgtgctatcaataataatttgatcttgagaataattagttaaatcttgacctactagatttttgtctgaaaaacgccaagtatcaccgtcttgatagtcacgcttaaatgtattgccgtttgcatccttataccttatttcatagaaaggctttttaacgtatgattttcttgctctgttttgctcatcaactaagcacgtaatatacgtctgcaagcgtcctattgaaagcgccttacctttattactataaccctgttctcttgccaactcagttgcaattcttgattcttctaatcctgttagaaaatcaaatctctgtcgtgattttccttttactaaaattccttgagcatcttgttcactaactgtagccttctcaggcttatgtaaggaatcaattacatagttagctgagtcatcacctttaaaacgaattcgccagacttcattttgccagtttaaataatctactatttcccaacctaatacatcaccttcaccagatgggtcattatcgcttgcaataataattacatcatgtccaggcaaattactcttaatattatcaatgtatctttgcttggacttaataacttgctttgaccaatttaaatcgagaggattccaaggaaagttatctaaattctgccaatccgcatatttagctgcaaggtttgggtcaaccatttcattaggcgcattgagttgtaataaatgtcctgcggcataaacaatatcatatggatttccttcaaattcgccactcattccacctaaataatccgcaaatttttctgcttgagactttttttcatttaaaataagtaatcttgtcacgttactattcctttctacaaaaaaagaatacctcagcatactcattatccaaaaatagattaatggaggcatttatattatatatcatttttgtgatatataaaagactagttaacttggttaatgctttccagaatgactttattcatttgactaatcatctttctaaagtagttgtacaattgttgatcattgttacaattgaggtacttagagtagaagtagaagtcaattcccttgctctctagctttgctttttcgagactgtaaaattattttttagcgtttttacgaagaaacttaactaatctatgtatgtcttgatcgcttaatctacctatatgtttaacattagtatcttttttagataccgagtaacgtctataagtatcaatccatgaatgtttttttaaacctgtgttttcatattcttttatttcaaaataatgctttttgatttcttcagatttatttttaaactttgtcgttatatcaaagaaaaagaccttatcttcagtttcctgtaatatgaaaattggtcgtcttttaccacctgaaacctgaacaaaacgaacatatgctgtagcaatatttttactcatcttttgacatccattcttgcagtttctcagggctatccaggtcttctgttgcccaatcttttgttaagttttgaatttctaattcatctttctctctttcagttaaattggttgaaaatggtaacccattctcagcaataagacgcttatagaacattgtgatagcaatagtaggtgttaaacctaatttttttagaacagcattgccttcttctaccacaccatcatcaatttgtacttgaattctctttttagtaattgaagccatagtagtgcacccctcatatcatttatactgatattatactactaaatcaatggaatcagcctatataagagtaatatttagaaaattatttactcaccacttgttcaataaattactaactgctttgcaatcctcatatcaaattttgcatttttgatattttttaacgatccaattcctgttcacctttttgaatagcaatttcttttgctttttcattggtcagcgaactgtttactgtagcaacatgtggcttgctagtttgcacttctttatcatcaagcaatttagacttttcttgatttttttcaatttcattttgtaaattgtcggttaacttgctatagttgccatctgctgtccagcactgcgttttattaaatgcatcatccaaatttctaactgtatctattgtcatacttttttcgatttttcttagtgccgtcaattcggtcttaaaattagttccattagtctcattgtcagtaacttcttgctccattttttctttttgcacataccattgcgagtgttcaggagtatctaagaagttttccttgacaatttgacccaatttttcttgttctttttcgagtaacttatcggtactattagttagtgtcttagtagctgaaccaacatgcgtcaaaatttgcccttttaccccacttggtaactcattaaacttttgtccgttgcttgtccaattagctatataatcaactgtctcttgcttaacatcaattccataatgagaacaataaagataacttgtaagctccgcttgcatctcttttaattctctaggcaggcccttttcttgtttttggctattatgtagctgtgcatgtcccaattcatgagcaagcactgatacattctccgttggagtgttgtatccatttaacacaatttcgttagtagccctgttaaagtatcccttagcattttgcgtatccttatatttatcccgaatatctgcattaaatgggtcataagtaatgactggcattttcatgtcattagctacacttcttaatccattctctaaggagtcaatctgtcctggattcttcatattaaaatcttggtgtctattagggtaaagttctgggtatttttcctttggcatattggtttgtggagcatcgaatacagtgccaatcttataaaaagttttttggtaagtttctatattacccgcctcaattttttgtttttcgtctttagtggcagtctttaagttagctaattctttgttgccatccttatttttacgatagaaaactgtagctttagtaggaacaaatattttaattcctttttcacctctgttgaccttatagcccatgcttttaaactttgcaaatgatcccaccgcagtcgcacctgggcgctgcatctgaatcatcattgcatttcttgaggaatagttatgaaacttatccataaaatcaagcatttctacaactttctctggtgattgagtataattatctacttctttaagtagtccattttttaaatcctcaacggtttgagtatgtttctttttccaagctttacggtcaaaagtctttctaggtcgtctttcagactttaaagcatttttatccatatccattttatctttaacttgacctgatactaattctggttttgatttttgaaggcgatcaagatattctgactgaagtgaaatatcatcattaagactcgatatctctttatcagttaatggtgctgcccaatcagaagtaaaactagatttattccaatctacatcggctaaagttccactttctttttcactatcaataactttttgagttaggggcttaataccatttcgattaatcgtgtgccattgataatttccttcagcgcttggtgaaaaaagataatgatactctacatctgaattaaggtacttaccgtcattctttgatatatcgttaatcatcgcagataagtcatgatactgttttctaacaggatcatcgattctttgtccattagaattatattcatccataagtttagtagcagctgtaggattttctggaatatggttatcgttatagttccctgtttcaattaactttttggcatcgtctaaagtacgataattatctagtaaattttgtcctgtgaaagtaagtccaccatccatatgaaaatactgagtagtaactgaaccatttggatttaaaattgatacatttgatcgtgttgacataatttttcctttctaagaaaacaaaaaagacgcttcataatgaagtgtcctgactacatacaagttatttcgtttttactactatcaccttctttctagtaattttaaatttacacgtttctgctgaagataatttactgtcttagctgagaataaaaaacgctgaagttttgataattcaatgatttcagcgttttttataccatctatttaagccttggtgcgattctttaatgttacctatctaattcttgattttggtagaatgatttaattcttttagtttttaggtcattaatgtcaatatctttttgcgaaatttcgttgctcaaatgatacgcaacttcgttcttgctaggtaaagtttctatcattcggtccaaagctttgtcttcttgttctctagtatctgcacgataaaatctcatgaggctaatcataaattcagcgtggtctatgttgtcaaaaggaagggttaaataatctctggtttcccaggtatctcgagcagagtttgcggcaattagcgctgttcttttatttccgtcctggaatggttgaagcttggataagcttgcaaatactctccacgcatctttagtagtctgtttagacgagttgtattgttcaattatttcatctaagtcttcggggtagacgttttctggagcaaagtatgcacctttagctgtgcctttagggtctgtgataatgacaattgcgtcgtctggattataacttgcatgtcttaagcgccctggaatacttgggtcttcttcttcgctatgggtaaaggctttattaatttcaataattccttgtcttgtaaatccgaatttctttgctgcagctatgccatctaaagcatcttttaagatggcaccatcgtggtgttgatgtacaagcttagataggtcattaagatctaaggctctttttgtttgcaacacagtactactgtagtcattcatactaccaaaagagactatgaagtttgcaaggtctaggttttcactcatttgttctcacttactttccgtttagttagattacttacaattttagcactatttaattaataatccttgttttttgagcggcacatacgcaagcggtatgtgcttcttttttacattaaattagcagttagtttttgattagctgctctttcttattatttatctttctaatctttgatctcttcttcgcataatatgatatccatgaggtatatatttaacctgcttattcaaagtttgttctaatctcttcactttttttctcctttacactacaataaatttaattgaagaagcaattttcaaattaaggttttgaattttcaattcaggtggctcgctgccttgtcgtatggcaaaagagagcgtagtgcattgcttttcaaaaagtccttcgatgtttggagggacttttcttttacactttttcttattgaatatgtgttaaaaaaagtttaagaatagcagtagaaattaaggatcattacttgatcatgttgcccactgccttgacgatatgctagtcagaatgtctattattcattaatttatcctttcatgttacaatgtaggtaaagatcacagtgcaaattaaagagttgtatttacaacttggctgcctactaccttagcgatatgctagcttaaagaaggcgaggaatagatcagtgagactcattaaagagcggcacatacggaaagcggtatgtgcttctttttttgcattaaattagcagctagtcactgactaactgctttttctatatgcttatctttctaatccttggtctcttctcaaataagccgatcgcttttcaaattcttgtcctggtaatgttctggttgtatgcttagatttttgttttccttgttgcattttccgaaaagcttttaaggtgtcattccaatctttacctaatttttcactaggtttacagtatttaactttaggaaatttagattgaatatctttaacaaatctttttccagcttcatcattatctacacctaaacctacacttttaagaattcgaccttctttttgtaattgtgctgctgtttgtgttatatacgagtcaaacacttcttttttaaggccatccattgaaacaaacctagtatttttcattccaccctttacttttaccttagacaagtcaaagaaactaattgcatcaattggtgattcaaaaaatctaatattttctggagtttttccattcatacctggtgaatcgaatgaaaaaccatatcccttggtagaatttttttcaatcattttgagggttcctcttctaccatatttttgatgattaatttttgtaccttgttttgatactcctttaacttgtcgtctatcttgaggatcaagccacaaaaaaagtgcgttacccaatttatcttgtgcaagcactttgtctctatgtaattgatctatagtttgactcgaaattccacgttgattgtgcaagtatccccatactcgattaattttattttctgaatctatttgatttttatcaaacttgaaaggttcttttttaatttgataaactttgccatcacctactccactagttaacaccttatccattgcctttaggaatttctctttttcatttaaattgctacctgacaattcatacaatgtagaaaagcttaatgcaccttttccatgaacttgtcttgaattccagtaaaaagaatttttggatggtgtaattaccaatgaatcatgttctacccctttaaattcatcgctgcctgtttgacgtaaatcaattcctgcactccttgcatattcaacaatactcgctgaattagctgccttaatttgttcctttgtaaaagtaagcatttattttttctcctattctttaacgtcaaaaaagcaagtagtaaaactacttgctaatttccccacctatacccgactaactatatagtcacaaattaagatgattctattctaattctcgttcaacttcattttgcaatttctcaaattcacgtaagttcttcttggtttcaatatctgcatttgtcttttcaaatactttttcttggttagatttaatttttcgtatttgactttgactgataaaaggcttttttaagtaaatatgtccttttagattttttctacgcttaataatatgtgaatgaagtgtatagtcgtcatttgattttatcttattattttgtattgttgtatccttacgaatttctttcaatgcggattgaatatattcgtttggatcaactttatctttaaaattaatcctatgtctttgattatggttagcttgcttatcaatttttcttaaatcagctagcaatgcgttaccatttcttgcataaattccttctttgccatatagttggttaattgcataattcttattttcacgtttacttttaccatataagtcttgtcggtcatcttgcattttccaaactaagtctttatatttttgaaaatcggagttatattttagcaattcatcaaccaaatgatccgacatctttttttgatttttatctaacttgttgtaaaaccattctcttcttgactcaggcaatgctctaacaaattgatttatctctgcttgaaaagttggctgttcaacttgactagtcaaattaacctgaattgcttctctaatagcttgacgtctctgagataattctttagtcatctctgaagaaccaatcagttcatttgcaaaaccacttttcatatgatcaattattttttgtggtcgcctacccttaggttgactaatcccttcacggtttataatttttcttcttgggtctttctcaactgttgcaatgtgaatatgaacattatcagtatttctatgaatggaagccacccagtacatctcatttaatggtggatccatttccttttgaaaaatactctgcatttttttagttgccttttgtagttcttcctcatttaatattccagttgtactagataaaatccccttcttttttaaaaaactattatcaaaactaacaacatcttgccacaagacagaattattctcttgtccttcatttaattgctcacgaatataatctaaatctttcaactgaacaatatctttgtcagagctaaatactccatctaaaactttttctttggttggatgaatttcactcagcttacttgcagcttgccctattctttccaattcagtttgttctttggtatttagtcccgtttcgttctttttctgatttaatgcatcaattcgtaccatatacccaagatacttatcaaattccttatcattcaaatcaaaaaaatttctcttttccattaacttttcagcagctgcttctcgttcagaatgttcttcactttttactctagtaaagttgttttcctgatttaattttcttacttgttttttaactcgacttaattcatctttttcttctgcagttaaaaattctttttcttctaatgcttcttttctggctatatatccaacgtaacgtccaaaagcttttcgtgaactcggcacagaaaattttgaagttaaaattatagctggtcgtcccaaaaattacctcctacaaataaaaattctatgaagcaagttgattaattattttgctctttcaattttaaaagccgtagaatcgcaatctcagcatcaaaacttactcaagttgtccgccattttcctccattctattattaattctttcttttacttttctctttgcagatttataaacttctgcatcaattccatttccgacaatttgcattccttgagtcatcaaaaactcacttaccatttctgttagaattgcaacttgttctttggtaaatcgctgttgttttctaatatcacttaaatcttttgtccacttagaatttttttcattttcttctgctaacttcataagatgatgaattacttcagcattattttttaaatcgtgttcctctttataatcttgaatccaatctaaatctgtatcagaaattgtcgctctaaaagttgtcttaatcattttttctagtcctcttaatcagcgtaagtttcttgtctttttttcaaagcattatcaatcttttgattaattttttgtaactcttccagttctttttctttttgaacacctaacatggcattgaagaataagaacttataaagttgaccattattatcaaagcaatgttcttttctaatctgcctaatttctttccattgcttatcgttgagtcgaaattgcaaaaagtgctgtcgtcccatttcttgccctctttctaaatttaatcatcttcttttgccgtgtcttctgacaaactatctaacaaatttaatgctcgttcggtgtcattaacatctccactaatgaaatactttgcaagaacattcagccctaataaattttcctgcagaagtttattctgcttctgaatcaataaactagtttgcgaatcttcattttgattttgaaaattaattggaatttgttcaatttgttctctcaaaaattgatttctggaaattttcttacttgaattttgatttaattgattaacaatccgatcaattctagccaagttttgttcgctgattccacggattaaaacttttaccataatttttctttcctctgatttctagtttctagttttccttctagtttctactctgaaatttgactaaaatctgcttcttttagttatctctagtaaagagcataagggaaatctgaccccacgccttttatcaaggtgtgctgggcttggttgtaccaagcgatttcgcatttttagaagtgatatcacttctgattaatttgacgtctgtatacttctaaattgttcgtcttttacctgacattacgtcttgatacgtaatgttttttagtgatatccgaacaggacgtattcttacgtagctcattacgtccaagacgtaacattttttagctaaattttgcacctaattatcaaaatcaccgtccttaatgtctctgattgtgtcttcatatttagaaattgcttgctgactttgtgtgatagctgctttgttttctgaaatatcattttccaaactactaatttgtgtttggtaattttctttttgactatcaccaactttttctaactttgcctttgcagaatctaaattattttgagaattttgaatcgtagcttgagcatccttaattgtattttgttcttgactaatcttctttttattccaattaatcagatattgacgataatcaaggatatagttttgatagctcttagttactttgcttgaagtcagatcaaccttattctctttaatgaagaactcaatataattattttcagagaaatcttgcatgttaactcgcttattaactttttgtggcagaatatcaatctttaaatctccaaagccatttttgattccgctaacctcaattactaaaaagtgattattgattttctgtgatttgatcgcaagctcttctccatcttctccgccacgtgacatgtttactactcttgtagcatactttaagttgcttaagtctgaatcgtcactagtagatgttacgtctgtagagtccccaagataatactctagcaacatctttccgctttgcttattgtaaatagaatttgctaggtaaaatgatgaattgcctgtcactacattaacagtttgctcagtgtcaattgattttcctgtccaatagggactagcaacgattgcaataaaaattgcagccaccactccaatgaatgataaataaattttgcgatacttatgtttttggtgtcgcttcaattcatttttgtttttgctttgaatcattttttgcctttctaattgtcatccgaatgtacacgatagtttttgctatcatttaattcctgttttaattcagtaatctgctcctgttgatctcgaatttgtctttgactttctgaatctggattatcacgattaaagtaaactgtcgccattaattgcgccgccgataataaaaacaacgccaatgcaattaatttcaaacgatgatttgactttttcaactttgttttttctgattgatatacaactcggctagacatttttaatctccttttatcacctgatctatcttttcaatgtttgttcctgaatatcgttctgcaattttcccatacttcaaatgtatgaaggtaggaactttagttaatttgtattcagaaatataatgtcgattcttaggttgattagtatttacaagttgaatattttttcttaataaatctcttttcataactgtgtaataaaaaatagatcgacaacttccacaatcatctcgataaaacaagactgttgattcattattggttttgatttttacaatatctttttggtttaagacatgacttacatgctggttgaaagcaaacactccaccaacaaataaaaaaatcattgctaaaactgttgcaatgatttttgttctatttaatttttttaattgcatttttagtcagcctctcgatcaacttgataacgccctaagtattcgatagaagtaatttgctctgccttagcatcataaattaattcataaccatcggttggcgttcccaaagttctaccctcttttgtcatctcgaaataaactttgacatatacaggaattttattactttccaaaatccctgcttttaaatcaagttcatcaatttgaccagtcatatctacgccactgtactgcaattccaattgcttattattctgaaacattgaatttgttttcaaaatatgctcgtctacaagatttgttttcttaatcttatctggaatctttagtttttcatcaccactatcatatgtataaagtaatttaaaaagtttgcgtacttgcttttttgcttttgcttgggcgacttcttgctcggctaattgttcttggttccctccttgtttcaaagctgtttttctttgtgagtttgcaatatttgagtcaagattctttaattccgtttgctttttggatagttcagcccttgcttgatcaacacgataatcaatagcctgctgttcattggtttcatatccaattactcccagttcaagtatgattccaagaactgcaccacctaaaagatattttttcttcattgttaattcccttctattgaaatttccttgaagctatttatcttttgagtcctcaagttatagtcaaattcccaaccattagtaatttcttttttgtttttgcttatggctacgtcaattaccgttacctttgtatgatttacatttgttaaattgccaaaataaatcattgtacttttattttttaagtagcccatggaatcaccataatacctaataaatttctctcctgcccgacctggtaagatttttttccaagcatcaaattcctttgcttgatttgacaattttctcttagtgtaaatgttaggtataacttttaaaaatctagcttgagcttctttttctgcgccaactacgtcaaacttttgtttataggcagaattttttatttgactatctctttcttgatctatctgcttattgactgtttgtatttcggatctaatttcatttaattcgtcattttttggaattctacttaaagcgaatattcccaaaacaattacagcagccgtagctgtcattgtccaaacttttaaattagactcgcgctcctttatacgctgcttcattttatccttctttcttagtattaataccagttgtgttctttccagaacttttgtgcattacgccacgaaccatatctgtctttgacatatttatttgccgctcttgtttgattcttatgactataatctcctttaaggtattcacgttttaactgatagcgaccataaacacttggattagttggattggtagcgtcccatctacctccagattctcgttgaactatccaatcacgagcctcagattcagtttttgataagccatcatcttcttcagattctgcatcattgttcaaaccatctttaattaatttaattgggtctttccaagtaccatcatctttgtacgcagagagctctgcggtagcaaaatcttttttagttgcaccaatgtgaacgtgagtaataccatgtgcattacttgctaagtgacctattttatctcctactgaaactttgtcgcctacctctaccttgacgtatttcaaatctgcttcatcaaagccgaattcctgataaatgacattccaaccgtcggagccttctacccaaacgtacattcctagactatcttgagtatgtccttgaaatgcaattttcttaacggttccaccatgaattgccaaaatatcttgtccaccatatggaacagtaccaaagtcaacaccatcatgaaagccacctgttcttgtagatgacttaccaaataattgctcacctgagattgtattacctggtccttttttaggaattgacttgaatggccacccccatttgccgcttattggcttacaatcttcctcagctgaattatctgagccactagacccatcacctttagctagtgatttattgcctttcaaggcatcatattttttagcttgagcttccatacctgctctatattcgctttcagctgcagtataatatcctgcttttttcattgcatgtgcgtattccgcaactgttgcatcttttcctaatccagcttttttaaaaccattctgaaccgtcacagcccactcggtcgcaaaatcacttaagttcttgtagtgaacgtaattaccaccttcactaccacggctttcacctttggtaccgatagtgcttccttctgaataagtcataccaccaaaattatgatcatgtttagcaactgaactatcaccattacctgtttcttgtcccatttgagcaaacagtaatctagcactaatcccagttttttcatgtacggcatctgcaatatgcatcatagcagtttgaccatacttaggtgattcaatgacgctaatacggccttctactactcctccttggtctccatttgtatcacaatcatcatccgaagcagcacccattgctgctattaaaagtacgacaaagtatactgcggataatacggctaaaattcctaataaaaaagcggctaatccagcccattttttagtctgttttaaccgcttaagatttgttatcattattgaccacctgcaaaaatttcaagttgtcgttcagatggtttcatcttgacttggtatctttctctccctcccatcgtgacaattgcttgtcctgtctgcaagtcagggatattactataatctgaactatttaatgcttcacctaataaacttttgattttcttaagttgagatgggtccatactcattagccatttgtattgacacagttcaaatacaactttcaaacttgacaattgagcagattctacagaatcagggaccatttcttccggtgattgtgtcgcaaagataattcctgcattaaactttctcatttctcgttcaaagtttttaacataatcaaccgcaaaaatattttcataattaatgatgttgtggcattcatctaaaaatacatcaaaatactgaacatcttgacgagtaattttccccgcttttaatagagcattttgtcttctaccatttatcaatgcatgactccagatcaaactcagagccatatatagttgtgcctgataaacattttgattcatcgttgaaatagctgaagaatcaaataataagagtttggtatcagttaaatctctcatagtggaatatccatcgaacaattgaccatagttctcaatcatagattccaaagcaactttgattttttcataagttctaattctttctctcgtaaattgatgttcttgataatacgttggtgtagctaactttttcagccagttcaaaaattgactgaaagttggatattttttgctatccaagttagtaattttgatattcattttgttttgttggaaatttctaggtagaagtcccatgtctacataaaatccacgaagtaaggaatcaaattcttgcatttcaatattctcaaatgatcccttattaatcatttggaacagaatatctaccttagaaatatgttggtaaaaacttgctagctcatcaaccttacctgtattttcatctacagtagttgccattacttcaagtggattaatcataccttctgatccatccaagctaaccacggttccaccataatgcttaattaaaggaatatattccttagtcttatcaattccacgaaagtacatatttctagcaattgtaccttcaaccaacatcttcattaaagttgatttaccagcacccatcttacccaagatcatcatattaaacgatcttctgatattagttgatctaaattgatcaaaataaaaggctcccccagttgaagtacgacctaaccagactcctctagggtcctttaagctttgagctgaaaatgggtcaccagctccaaccgttaaggctggaattggttgttctggcaatgctgctaaatccttttcttgctctgtgattggtaatgccattgatttaaactgtttatcttgcataaacatataaacagcaacgttataaccctcgcctcgaagcttgccacgaagattagaaactgattgatctaatgcttcaatcgttggagcatatacaaagattctagttagcattaatttaggaatttcgccaccttgacttaattccaatgcatatttttctagtgattgcatatctttttgtgcatttaaagcatcagtggcttttctagcattaacttgccggtcagctaattcttcaattgatctattcaattgccgcttaatttcatagcccgaatcagttttaacgtcaattgtagttaatgttgaatcatttaatgacacttgagtaagccagagcaaaagcggatcattaggataatggattacagataagcaagcagcatatccatcacttgcaattgcataattatccgcaaaagtaataccgccctgcggttgtacttctgctagaaacttagtattgtaaccattttttagtaattctctttgctttttcaagctggtaacttgtcttggatttagctttacagttacctttttcttcttgtgtctctttgttttcaataaactagaaattctcattttttctcccttacttactattcaagttgttttctctaaagagtactttaaccgtttcttcatagtccaatggtctcaagcccattaacccttgatcagcaaattgagcggttctagtgttaactctaatatcgtgcaaatcttctccaaaaatcataatgtaaaactgcacatcagagtaatcttctgtatttcttgacagcattactgattgcaacaacatttcattaactaatcgtaaacgcattttttcatatctggttttgggtgaacgaatcccattctttaaatggcgaaaatactgttgttgttcactagtatcaattctcgtcgacatgactacaattttataatcgttgctataaatccgattaaatgtagtaaatgaatctaggtatttacttctggtttcatcatcaagtgaatataaatctgtcgaatgtacacgcaaatagcgtgcttgggtgccatctactaaatcaagtatcccgtcttttgagcagttactatagcccaagtattcaactattgattgatctcttgcatcttgtcttgatcctttatctaagccaaaagctctaaacaagctaggagctttgctcctactgtttctactttttctttttgttcgcattattttctccttctaaaaataatggataatatctgctttggtcttgtcgcataatgcttaacaaaacacgataatttctaatctttggcgctagaggggttcgcattactagcagaattcctactacaactccaaaacctgtcattactaattgccaagtcggttgtaaattaaatagaaaagaaatttgttgtcctgccatacccccaatgaaaagagcaaaaacatcaaacatatctaggaaaaagatttggatagatacattagttgacttaggaatcattattttttgatatttatccatgcactaatcctttcttctgctatctccatgacctaatttgccaatgttggtagaacttggtgatttagtttcagtagagttttcaacttgctgattgattgtggtcttatcatgcttaatttcagtcaccgtgttagtattgccttgagtttcaacggttctattagtgtttgaaggtacgctgctcttcatagcatccttcacactactcattccttgattgcctacatcatgagtagatacttcagttctgccagcctttctttcaatatctacatggttggtaccagcagtttcagttactttactatgactgtcttgtcccttaaagtctgaaacattgcttaagtgtctaccgccttcaccaactggttttggcggtgtggtttgttgatttgaacgttgttgacttgccaactcactagtggatttttgagtatctctcaagcttggtaattcatcgaccgcattactacttgttggtgagcttgaagagctatttgcttcaccacgctttgaacctgaaccagtaacagaagcactgttagttctaggatcatttgctgtttcttttttaccagtctttgaaccattagttgcttcactaactgtggtatttggaatttttgcatcattaccaattgtcttagctccacctgttgacttaatagagccgtcagttgaactttccttagcagcatttgatttaggcttgctatcatcggtcttaatgccttggttttgaatattatcaggtttaactgatgtattcttaccttggtcatttacatttttagctgaatcaacattgcttgttgcaactgtttctttcttgccatcatagtttggatttcctacaaatgaagtatcacgtccaatacctgttggttctgcactgccaccattcttttcagctctgttttgcatgtatggattatgatgtaaagtgttgtactgattatcagttaaaccaccatttctcatcattctagcggcttcatcttgtacagtttcagatacagcgccagaatttactgccctgttccaatcaactgcactgccaccattctgcttaaagtcgttatgagctgaacgaaaggctcttcttgcataactgccagcttgttttgcttcactattgcttgctccattttccttagcaatagccttagtagagctaccagcttgccaagcttgagcttcaccaatcgctgcccctgctaacttaccagaacctctggcaactccaacagcgccttcagctaaatttttacctttaccagcaatatattcagttgctgcaattcctccagcaactttactccaaccttgcttaagtccagtatccaaaccaaagaatttttgcaccttgcttgaaccttcccaaagtgcccaagttaaagcaatcattccaactgcatataaataaggattatcatgaatctttcctgcatctgatgaactcatccacacggctacaattctatagaacgctaattcaaagccttggaatgcaattaacaacgctgaactaaaaatatcttgtaccgcagctttagtacgctttccagtttccaaatcagtggagaaaataatgattgataatacttgcataattgccaattccacgaatgctcttactgaaacaaagcaaactagtaagaaggcaactgtcattgaaagtaaggcaactacaactgggaaaaattgtactgaatatcgttcatatccaccgttaaaaattttgaaaaaggcagtattgctttgacttactttggttgcataatatcctgaatatgcttttccctttacatttgatttcgtaccaacgcctgtaggagctaatttataacgcaaattgtcaggatcccatgctggtttttccttagacttatttgctttattacttaatttctcagctaaatcagctgaaatagtagttgataaatcgcctgatgttgcagtatcaaaatcagacttgttcatagcaaatgaaccatagtgaacatctttttgtctctggtctttaatttcaccatttttatctttagaaacaccttcccatttggtattagtatccccattattgattttgaagccactaaaattattagctatgattgctaataggtcattagaattggcttgtactacctgatatggcaagcttgacgtccctttatcattatcagcctgtacaaagcctttatatacacctgtagactgatcaaccacccaatttgtaattggctgaatatttccgattaagaacgctgaaattgctaattgccaaacgacattttttaattgaggagctttacttgaggtaccaattttaattccgacccaagttaaggttaaaatcatcaaccctgcagcaattcccattaccccattaattaaattagtatttaatcctgtggattttaagattcctgagaaatccaaactatctgttgctagttcacttgcccaattggcaaatccataaaagatcttaactatgccccattttgtctgattcaaaatacgtcccaaaaaatcatcataatgtaaataaggtgccgcattttgtagagcttcagttactttttgtaatttggctggatcataatcacctgaattggttgatttttgccaccaatctaccaaactactaaaaatatcaagatagttaggattgatgaaactagttaaatagaataaccaatttgtcattaatttttcctttctttaaacaaaaagataagtagtcattatcgctacttatcttgataatattcattaaagctttggctaaattcctgtgttaactcattcttttccttgttcttatcttctaattttttatctttatagatgatattaacaaaagctattgaacttggtttttgtccttcaggcacatcttttaattttatagcctcgttcaatattgcttgttttgttccatcactaatatcaccatcatgttccgttaaccagttcgtgataaatggtggaatctgattttcttcttcctttaaagacttcttcatttcttgttcttctttagcatctttagtagttgcttgaacatttgcgtcactttgacgatattggttatacgcctgcaaagccaaattttcttcttctactactgcatttccatcttcatcttgtttggtaacttgttcagtccaagttaaccatttgctccaatcgatttctaatgcttttaaattaatattggcgtgtgcatcaatcttttcaactaaatctggattagttttaggattaaagtcatcagttaagaatgtatgtgcaaacggcattaatgtttttcctgtgttaaaaataggatgtgaaactaccgcccagccccatttattcattcttgttaaaggtctcaaaactaatctttcaccgccagctaaatgttctaatcgttctggtagtatcaacggtactttatctacgctaacactaacatttttggctaaaccattttgatctttagaaatattgcttgtctcaatcgttttattgccacaagcttctgaaaattctttgttagtagctgaatcagtagacataatcaaacatttattctgacaattttctttaataacttgtccgtcttctttgccatacttactgtagagctgggcataagactggataactaaagtaaatagaatattacgacctgctgaaactgtcataatctgatccatattctgcagcggaatcatactaccaaactcatcaaaaatacattgtactcgtctaattgtctttccaccttgaaccagccgacactgacgtgataattctgtatataattgattaacaaaaattgtagctagcaagttgtttgaagcatctgaatctggaattttcataaagactgcaattggcttatcactataatgcatcttaaagttttccatcttaatttcaggttttcctacctgacttacttcaacctttttaactttaggattaatctttaacttaaaagtattcttcaaacgcttatgtcctgcaatagcttcaatttcaacaaagcttcctgtttttagattgacatcaaagttgttttcaacaaatcctttttgactaacacgaatctcattcgttttcagttttttattatgattatctctaaaattgattttaattaactcaccatatagtcgttgatcaagcaattgaaactccaaatattttggaaaaccaattgatttcatttctagtgtgttcatactggtcatgcgtgagtttttcggtaaagtgaaaatatctagtttctgtacaacagttgaaaaaattgagcctcttgccttatcacctgagaaatttgtggaaccgaattcttttttagcaatagatccctgttccaaatgcttaaagtattcacttaaaacgttgtgttgagtatatggatctgatggattagtataatctatctgtcctaactgattaactaaatcagcgatatttacaaaagtaatatattctggatgggcttttttatctctaaagtttttaggattcatgcaatactcaatcaaagcaataatcataccattaacagctgattgtgcgccgtcattaaaccacttgttttgacctgcttgtttatcaaaataaagcgagtaggtaattgagttaactaattgcattgctccttcaacatcaccctgctcccagcttctaatgattaactgtagcggattaaatgcgattcctttgtttgggtcatctaaatttaattcataaacatcatagccacgcttcctcaacgtatttacagaagcaacatacagttctcctttaggatcattcacgactagtgacgattgtttttcagccctacttactaggtcgatttgttctaatatagtagtttcacctttaccagaccgtgaagtaccaacaatcaaattatgaactgtacttgtatcaatgaaataatagccatgtttagtaataaatggaaattttggggttaatcctaatctattaatgtgagcaatgggaaacccaccaaaacctttaaagctaggctttttaggatctaaccctggttgactatgatcaggcacttttacataggtgtcttctaattccttaactgtagtaaaacgggcatttcccttttgcccatgagcgactttttgactttcaaagtgaaatttttgacttaacaatccaccaataattacgctagcagcaaatacctctaaaatttccatgggcttcaactgtgtcttaaagaaattcaagccagctaatcccgctttatctaaatcgagaccattcgtgaataagttatagtttttacttttagtttgtaacatgacattatggaatgctcctaataaccacattattactagaaagataaaaattcctataaccaacgttgttattagcttcgtataattaaaattaatattgctagactgcttgttttcatttttgggacgatgtaattgcctttcaacttgatacaagcccttttttacaagattctttcccttgtttctagcattttttagatttattcgtgatcttctcttcttagtacgcatatctagctaaccacccatcttgccaatcagcaatatcatagaaagccaatgcgacagcttttttagctgagttggaaatttctgttcgctgatcatcagttaaacttagccaaatatcccttgtctgagctttgtcttcattagcaatggcactgtacaaactagcaattggatttgaatatattgtagcaatcttctttaaatttcttgcatcaccttgccctaataaaccatctagcatatctctcttttgtgcccaattcttagtttcacgatattgttttaaaacagcttgtgacctagttaaatgggttggagtagatttagtctttgatttagcattaggttttttatttttagcaatatcttcattagctgattttttatcagattgcttactacttgattgcttgtttttcttgacatgcgagtttgaacttgatcgttcaattgaagctttttgttcattattagaatggttattagtataagcccatgtaccacccaaagccgcagctgcaaggcaaactaatgagataatttcagatttatagtgacgtttcttaggactgttatcctcggtttctggctttaactctgaatcttcttcatttgattcagaatcaattggtgcatcatttttcttagtatcatctaagtctactacttcaccatcaacatgtggcacaggcactaaagcattctttccatcattatttaaagtaatttttacgttaggattttctaaattattttgagtaattgctgcagcaattgctttcgcaaattcctcaggcaactttgccatattttcttgttgcaattttgccaaagactcattctgctcaattgctttttgctttaaatcaagttcacgttctttgcgagcagcttctgcttctcgctgacgcttttcctcagccttttcttgatcaagttgcttttgttgatttatttgttctttagctaatcgaactctttcttgaaccttctttaaattgtcttcaaataaatcattattcttgtcatagttatttctaactgcatgatcaaaatcattactaatggttgttctactatcatctaactcagaatttcgtttttgtacttcttcatcacgcgcaacacgctctactttagctttatcagcctttaattgctcatcaatttgttcattagcattacgagttttaagttcttcttgatcattaaaattttttagagctaaatttcgtttctcttctaattgtttcttatactcagctaatgcggcttcatcattagtctttagttctagtgccttgttttcttttaatttactcaagtcagattgattattttgcttttgatgagttgctttaactgccagttgttgaatctgtgccgctgttctgccttcaacaattttatctagtgactctttagtaactctgttatatgcttcctttaatctatctacaattgcagcctttgatttcgctaaaccttcatcatatacacgttgaatatcttgcattgaataatctcttaacgcctgatcaattttatcattcaacgcttgatcatattgatctttaggattatctaaatagcctaaatcatgacgaatattatttagagcaaattgatttttatcatatcctcttggcaaacggtcaagaatatcattggcatcggtatatttgccatagctaattacttcactgcgactagtttctgtttcagttgtttgacctgcttgaattggtaaagcatcaacctcttcaggtaattgtgtaggaacattattcaaactaggattggttgcggcattactatttgattcttctgttggactgttatcctcagtctcatcatttacatcattttcaggaggtatttcatcacgcacttcatcatctgaatctagaatttgattattattaaacatgaacccattgtctttatttaagtcctcttcatcatcactcaaactaggttcaagttcattaaagatttgatcctttagtgttgttactgtttcttcttgatcacgagttaaattttcattctctaaatcacgatcaatcaagtttaaaatacccccgtcttgatcctcaggtaaaatttgtgcttcaaagctgctctcttcacgatcctcatcttcatcatcaaagatagtaaatgtaacattagaatcagcttcttctaagctctttgcatagtccttaactgcatcatctgcagttttaatgtctaattcaggcgattttctacttaatttatgcttaaattgaaaatattttttcgccccttttggtaccttatcaaaggtaactaatagcataatcttctctccttctttaacgcccaccatcaacccagtaagttaaacttacttcaccttacttacaaaactaactatctagcattccaaccaaacatatttgcgaatgatggtactaaacttgcagctaaagcaacaatggcaacacctaccagtgcatacatcaataattgctttgcattttgcgacattctgttaccaaaagcgaaaagaataccagccaagataataacaacaatgaacatacctttggcgatactcttcaggttcttttcggtactaccagtagccttattaatattgctccaaacactaaataaaactggatgttcgtttaaaaaagcctgagtaccgattaagccgctccaaaataagtaggtcaatttggtataaacagctaaaaacattgttaatcctccttgtataaaaaaagcatttagttagctaaactaaatacttttacttgtcccattaaaatcacttgtaggcttattatcatcttttgatgacgtaaccttatcatttaaagtcttatcaggttcagcaatctgtagtttctccagctgctcggataattcttttttacctgcgacttctaaaactgcatctttatatgcgcttttagtgcctgagatcaaatcttgcacaaactcaaccataattttttcttcccaagccttttgtgttaagccttgggaattatgtagcttgcgtaaaatggacttgtcttgtttgctaagaaccatttttcctccttaactattgcccaccatctcacccgaaagaaaaagaaggattagactttctcaccatttcatctaatcctttatacgttattcgtctttgtcattaggtaatgtttcagtttcacgtttattatctttatcagtgtttttgttcttgttcccatctcctgttgggtcaatatcatcactggtataatcgcctgaaacctcaatcttcttatctgcagaagcctttggcgtatttggcgttacgtgagtaatattacttggaatgtcttctttattgaacaagaaatgagattcgtttggaacttcaatcatattgttgtccttgttcaaataatccaaaagctttggtgtgttaattaaagtagtatcaataaacatctttaaatgtttaccatgccaatttgctggattattggcagtccatgacacttttcctgtcttattatcgatttcaagtttaccttgatcagtaatttcttttgcgtttcctgcagcattcttgtcatcatagtcgtaaacttttacgcccttaatattttgaacttctggttcaatagtatctttaattgctaatgaagtaatgtcctcattatcaggaacagtagcttcaacacggtaagtgtacttcttaccgaagtctacatctctaagtgacttagaatcgcctaatccatcttctgaaacaaacttttcatcctttggattagtaaatggaatattagtagttacttggttagaatctgcactaccattatcttgaattactttagcttcgttgtaaattacagcttgatctttatgtttttgatctgcgtggtcctttaagctttcaccgcgctttacagttgcagcaaaggtaatcttgtaagtttcattatagaaatcctccattgctaaagcatcagatttagcaattactgataagttattacctgaagataaagttactgtgaaattgtaagtaacatcttgatttgcacggttataaactctaattgagcttgtatcaatattcagaatattatctaaattatcggtgattctatattctgtatatttcaaacgcttttcaacgtatggtacagagtgtgtaatttgatagtgatattgttcataacgattatcaagcatatcatgtgttactgacttaataccaccaacttcatctggagtattagttccctcatccttatctgagacatacttattaggattcattggcttatctcttacgataggtttatcgaacatatttagataagcatggttaaacgtaccattccagatactatttgaaatagaaaccttatccttatcagtcattccagcatcaggatcatatttaccttggttcaattgccaattatcagtatcctgttcaatttctgtttggttttcagctgcatgttttcctgttgtagtaccaaaaacccaatacatattaatatggtctgtgtttgacattgttgctgtatatgcagccttccaatctgaggatcttacagtacctgaaccatcaggtaaagcggtattgtgttgatttgcatctgaaaagatgtaattattccctaatgtgcttttatagcttaaccaagtatttccatcattttgtccatctccccaaataacctgatcaattttgccgtaggtagagctatcatatcctacccattgattaccgtcaatatcacgaacagtttggtttaggtttaattttaacggcttaccagtgtcatgatcaataaaatctatccgataggcaacagctccttgaccaggagtaaaaatttcaaaattatctactccaaaggcaattgttggattctttagtggtactttttcacgcttaccatcagaagtatcttgccatttatatgaatgaatattccaatctgttgcggtgattttaacatcaatagttttcccactattagggtcaataccaacatttgagtaataaaccccaattttaccagctaattttttatttcccataacggaaaatgcgtaccaagagtgatgagacccttcagtatttgtactagaagtagcccaatcttgtgaagcaccaccaaaggcatggattttggttacaccctgagtaattctaggaataaaagcatatgttcctgccattttggttccaacagcattttgtcctttaggcaaattgaccatttcggcgttatcagcatgtacagtatctgatccagtagctagatatgtgcccagcccaaagctcgttgccatcaatgcaattgcagcaaagctgactactttatttttctttgttagagaaatcatataatttcctttcttttgaataacaaaaaaagaagagccacttttttatactcttctttagacttaattattaaattagattatttagttagcattattccaagcactaatccattcaggacttgtaccatcaaccgtgaagaatgaaattcctactgcacttccatcggttgcttgtttatcgtagtaataatgtacacttaatgcaccataagctttatattctttccaaccataaatcattttggattggaaatcatctgactcttttaataccttaaagattgcatcagcagcttgttctggagttcgtccattatgtgtaatatctccacccattagtaaagctttatgattttcaccatatgcagttggatcaacatatccaatagcttgattcaaacccttagcagctaaattaggcaaaaaggttttaatatcattagtattctgactaattttaaaactaaacctgttataagccgcagtaccaggaacttgagcttgttgagctaagttagttagttctgcattagttttaaaagctggatagccctttgattcacggtacttttgaatgtcttgccataagcgcttttctagacgctgtaattcgttatcactaaagtaaacatgcttataaccatatttctttctgttagcatcttccttagccgtcattggtccatagaatgttgaccgccatctagtacttaataaactactattatcgcctacaatgtttgatttatttggatcaccaacatattcagaatcattagtatttactccagatgacttagacgaagcagtactggatgaagacttataacttgcagttgaacttgtattagtagaagcaaactttattacgaaattagcagtacgaacatatttgttcttgccaatcttgtaatatttcttgcccttaatagttttcctaccaaggatttttacaagtttacctttcttcaatacttttttaccgacacgtttaccctttgcattataaatataagcattctttgtcaacttctttttataagttgctgcttgtacaacagttggggtattttcaacattgttattaactaatgccacagagctaacagataaaacagctgctgcacttaagctaaccaataatcttttcttcatttctagtatcctccaatatataatacgtggaaaatttattttttctacctgtattatataccgtttttatgacaaaagcagcagctaattacttagtaattttagtaattaaccctttaatcttattcttaaattcatcattagtcttatacaaataagtaccaattccaccagccattgcaactaaacttgcaataatccagccagcatgttgcaagataaagtgacctgttcttggcaagaaaccatttttaccagtaattggattattacttgggttagctggattgtttggattatctgggttatttgtagagtttgtagttggattctttggattatctacattgcttggtgattccttatcttcttgtggtggaattacattaacagtatttgatttaacatcatcattgttaaccttcatatcagcagtgttaggaatttcaccattaactttagaatccttctttaacttagcagtaatattagcggtatatttcttaccacccatctttccaactaaagattgatttggtttccatgaaaacttctctgtattgtcatctaatttaagttcaccatcattagtaatatcattaccttgatcatcagtaattttgaccttttcaaggtctaatacatcctcaaggtcatctgtaaattcaacagacttaacatcttgcttattaccaactgtatagtcaactttataactaaagtcttcatcttgcttaaccttatcagattcaccccattgacctgattcagcctttacttgcttagttaccaaattgccgaatggatctggtttctttccattctcaggtgttggttcttctttcttaggatcttcaggatttttaggatcaccatttaaggtagtatgcaccacgtttgttggtgtatcttgcccattgatttgcatatgaccagtgtttggaattccgttattatcgtagcttgtaacatctgcgttaggcttgatattagctgcaattgctacataaataatcttgcgtgagaatttagctggatcattggcagaccaagtgaagctttcgtcttgatcagaagtggttaatttaccttggttagtgatgttatttccatcactatcaataatgactacgttctttaaatcaagaacattttccaagtcatcacttaatactaatgacttcattgcttgagagttaccaatatcaaatgttagtaggtagtcaagagcatcaccgcgacttgcttggttgctatcaacagttgaagcactaatgatttgctttaagtcctctttactagttggaactttagtggctacatctgaactagttgcttccttacctgcgttagggtttgagaacggcttttgtaagattttaacagcctctgcatactgttcatcagtaaccttatcattagccttgctccaaatgcctgtgttagggtcaacctttacgtactcttgcgctttctgataagtcttaggtaacgcagcatctgaatctgattgttgaccagatgaagtttcactcttattgccaaaaaattgtgtccagtcaccagggttcttaacaattcccttatggaccttaggctcttcaacttttggagttacatctgtagtgttagatggtgtatctttaccattagccttaaagtgtgctgtgttaggaatttcaattgtgttgtttttaatatacttttgtaagtccgcattgtctttaacctttgcagttacttcaactgtatatttctttcctggcataacttttactaaatctttgtttggttgccagttaaagctttcattcttttcatcaagcttaagtgtaccttgttcagtggtaatatctttaccatcggcattcttaacaactaccttttcaaggtcaaggacatcttctaacttatcggtaaactcaacatcggttaaatgttgcccttcacctgcagtatagtcaatcttataagtatagtccttgccaacctcaacattgtctttatcttcatgataggaacctgatagtccctgaacactcttaactaccttattttcggctggaggtggagtttcaaccttaacaggatttgaaggaatatctttattgttgtacttcatatgagcaacattaggaatttcgtaattctttgttgctttattcaagtaaccacttaaatctgcatcggtcttcagcttgacagtaatatctgcagtgtagatatgctttggcatttgagttagatattctttagaaggttgccaagtaaaactttctttatctttatcaagttttaaatccccttctttagtaacttcatttcccttgtcatcggtgatcttaacgtcttcaagatcaagaaccttttccaaatcgtcatagaaaacaacattactaatgtctttaccattttcaggaattgaatattgaactcgataatggaattcatcaccagcgtcatgcttggctttttcaccatattgactgttcttatcctctacttgcttaattgcagtaggttcttcatcattcggtgtatgaacataaacaggtggggtcttgatcttttcatcgttatagatcatttgaccaacattaggaatgttgtattgattcgtattcttatccaaatacctgtctaagttagcattcttttgtaacgtggtttcaattcgcatgcttaacttcttacctacccaatcttgaggcttcttagccgtcatattggttgtatttgtccccttatcaaaatctgccgtaaattgatcagtaacatcagtgttaccatcaaaaactctggttttattatgagtaaacactggctccaatttatcgaaaagaaccaatttctttagatctacattgtatggaacttggtagtaaatatcaaaagcaatatctgatccctttttaaaagtagcatcactcacatatttcacatcagctgctgcatcagccttaacaatattagggtttgcattatgattagcgacagctacaccaacgccaacactacctagagtagttactacacctaatgcagagagtaattctctagtttgcttttttgatagctttttcaaggctattcctccttaatttaacaaaaaaaacacctgcatttttgtcaatgtcacaaatcaaaacattgattcatatgtaggtgttttctaataatatataattattggcaattacttgtcttttgataattgcttgattttgatagaaaatggtttatttgtaccatcttctaaccatgcataatcaagttgtgcattttcactatcagcgagatcattagctttttctgtatcatagtgtaattcaatattattgtcatacaactctcttaagcaagcataaccaagaattgccaagaaataattcttatccttagtcttatcttcaaagacatctggatacaaacgactcattctttccattgcatcaatatattcactttccaacattacggtttgaaaagcataaggtctatctaccgctgtataaggagtatatgctacatatggaaaacgtccatcatacttgctagccaatccttccgaatacttaaggaataaccagccagcccatagaatccgaactgaagccactcgattgtcttttctatctactagccatgcaggaaacctttctttaataattttatttgtatcagcaagcatagcttctggtaattcaaaatctacaaaaacttgttttgccataacattttcctttctaaaaatcaaaggagcctctaacatacttagaagctcccttataactttctgagccagtatatttaccacgaataaaaagtctaccttgacctgtccagtcacaggtaaacaacgaaattactggcttcttcttaaactctttattattccaagctaatcttaaattataaactgaaataaagcgtgaagatgtaatcttgtaataataaactttcttataatctgttaataagattgttgttccattaggtagatttcctcttaccttcgcagtatataatgggctaaagaacgaacgcccatcatccatattatgacctgctaaagcgtaattgccttcacccatcctctgatattggttcattgttcctgcacctaagttcagttctacattaccaactccacgatagatatttaatagaacattatgatctcttattgctatttgtcctacagctcgataatctcttctatgctgatatgcattggcaagagattgaggtgatacaggttggacagccttcatattaaaacttggctttttcttctgtttgttttttctttgactcgacaaatgattagttgccacatagttagcagcttgtccttgaatatggtcaaaattagcaatgcagtaaatcgcaaccccaattaaaattaacgcaataatagctattactgtaccaatttttttctttttatcactttttcgctgttgattaatagctaatctacttttttttattttcattttaggaacaaaaaaaggcaattagcataactaattaacctttatttctaatttctacttagcagcttcccaagccttaatccattctggcgaataacttcccacaacggtaaagtttaattccaaaccgtgatcgatataatctccctcattattgaatctaacttttaaagcagcataagcatatttatctttatgtccttcaagtgttctcaagtctatgttgtcttcttctcttgtataagcattaaagatttcatctgcgactttcttgggatctctttcttttagattaatgaagtgctgtttcacattattatatctgaaggcatctaaatcattaagacttctcgcactatccattcctaacgcctttaatttaggtaaaaatttagctaaggtatcagtattttgaaatgtaccaataccatcacctaaagcgttatattcaggagtacctttttgcataattcgatttacaaagttattcaactctggatttgtcttgtaggcaggataacctttactttggcgataagcattgattttttgccataaataattttgaatttgggatacttggtcatcagtaaagtagatataacctttttctttgatccattcttgttttttagattgagaatttgagctattataattattagtctttttttctgctgttgcagaattgccagtagtattacctactgcagtatccgtagcattattgtttactgggttattagcaccttcagccgaagttgattgtgcattcgtagctttcacatattgaccattgcctaaggacaagtaatttttgccattaattgtcttaacaccaactacagtaaagacatggttcttctttaaagtatcagtgcccttgattcttttgccttcagcgttataaacataagcattgtgggttaaataatattgaccgctagccgtattagctttactggtcttcttagcaaaattagcaaccttaacgtattgattcttaccaatgcggtagtatttcttaccataaatcttctttgtaccgagaatcttaactgttttgcccttcttcaatactttcttgccataacgattgccattactcttataaatataggcattatgagtaagcttgccattttttactgctgcttgtacaacatttgtattattagcaacaccatttatttcattaacacctactgctccaactgataacaatgttgcaacagataaacttactaatacattctttttcataaacataatttgctcctctttccttcaaataattcagcttaaattactagctaacttttccccgctctcacctgctttcattatactacatacgcaacattatagcagcgggatatccgttaatttttattattttaaaatatactcttgcgtacatcttccaaaacgatcatatgtaaaagataacttcacttgatcattctttcgggaaagtaatgcacgtaatgctaatgtttctttttgccttaaaggtgtaaaatctttagggtattccctcgctaattgattgcgataacggacatactcatccgccgttaatcttgtaacatctaattttttcattacattaaccaatcgatcaacgtaatcaaaattattcataacttttcatcttaatttccctattattatagtttgtgatctctttttaattaccaacggttttacgctatgaccgataacgatgatggtttcttagttagccatcaaactgtaagtttttgtacagtacgtagcagatagcttcacctatctctagcctctcgcttcacgcattccgcaagctgtcctcttatcaatcctaatcaaagactctttcttgcccttcagttactacaacacttaaagagttaagtttatcgactcacttactattgttgatcacattccgacttcttatttactcttgagtttttcatcaaggtattcacatgtcaaaacagccaaaaagaatgtatgcttatcttttagtagcctattacagccattactattactttaaatttaaaatttcgttcaaactaagacttatcatcaagccaaaaataatagtaatctttgttgatggacggctattcccatcttgacgggtgtgattctttcttcttccacctttgtgtgccttcaattctctgtcttgcaaatcctattgagtcggctcaatagtcatgcacacgtcctacgcttgttacaaagcatagttgacgcttattctgttttcaatgtactagtggactgtctaccagtcctaaaagaaatagctgagttgaacagctaaattattgatcaaaaatcaataattgtaccgactttcttaatgattaacattctaaagcttttacttcttttacctggttagttacaactactgctacaataattgctcctgtcacagctaaagcggttaaagcaaccttgctaaactttttcacgtttatcatctcctctgattttcgtttacccatttcttcaatgctgctttatcaatttttccttcttgatagcttctcaataatttcaaataattgcttctagcaacttctttttgtgtaattcgttgcagtagcttttcttgttgcttcttggctttcttaagccccctattaacgggaaaacttggtgggaagccctgatttcttgcgattgtttcattaacttctgttaactgttttcgcaaatcattaatttgactatcatacctaataaggagttctttaggattatcatccatatttttcttcaaatttttcatgtttgaatacgctcgccagacgtaataaacaatataaatacctactgcgactgttattaacttatacatatttttcctcactagattagagcggaaagattcgaactttcattgcaagtattaagtattgagtattaaagtattaaaaatagggatatatatgaatatcaactttttgattcaaaagaggagcaactcctttaaccaatattcattccaacttgcattttacctattaaattacgccctagttttacattaaatagctccagtaatatccgataaataaaatcatgatccatagaataattccaagaatcgatagcagaactgtcactaattcatccaatttttcaaaaaagttagcaaaccttgtgcctgctaaacttggcaaagatgatattgccataagaataattatgaataaattccccgctccaaatgcgatcactatgtatcgaaaatgttctaatataaatgaactgatcataatatcttacttgctaacatcaattagcggctttttcctatgatgagattcaggatattttcttttacacaataacctgcgatgtcctaatttaggatttacttcaaatccaaagcctaaataaatttgatcataaatctcacttactcgataaaaagttacttttttatatccagtattgtatttataagactttagagacaaaaaattttggggattttttataaataacccgtcaatattccagtaatggtacccatctatcgtcagaatttcataaacttctttttccactctgaatacgctaaagcgtctattttttactgatttttttgtcatccaatactcaccaatcgcattatctttattaaaatggtaaatcagcatctgttagttgtacttctttctgacttccaaaaggttcttctgccaatttatcttttttgtttgcttccacaatggtacggtcagcttctggctcttcatcatttgcttgatttgaattctgaggaatagcttttgtagactcttcattttgacttgttaaaacatcaaatgaattaacccagatatattcatatgcaaccttattaccatttttatcaataaagcttctagtcctttgttcaccagctagaataacttttaagcctttatgtactttagcaacgagattttcagccactttattccacgcaattacatggtgccattcaccaatatagtcttgttgaatcttgctataacggttttgacaaatagtaaaggctacatacttttttaaagattgggttgtctttaactccaattcttttccaatgtagccgtcaattacaacttgattaatcatttttttctcctcctcttttaaaatgtttcctgatatttatattatatatcgtttttacgatatttcaagacaaaaaataatatacatacgcgtggtgctagttaaatcgttttagttaataaaaaagtccaatcttgttagactcgacttgtaaatagtaataatagaaaagagtctgatctgattgaactgtcttaagcttaagcgttttagccaccatttacaagttagttttaaagatttagtgataatttgtcggcactggtatcgtttgtatgcaccggctgagtttactcatcggcgaaatattgatcaaattaaaactacggacagtctgattttggctttacttatctggcaagctaagacaggaattgaatcacaaagaagattctgtgaatgtttcaattgtttatcacactcacgttttaatcgacgttcacgtcagctattgcaattgatttatcagatacggcaagaaatgaataaaaaggttgacctgaatggacatttcttgatcattgacagctttccggtacctgtttgccaaccaattcgcaactatcgtgctaaaatttttcgcggttatgccaacattggttataaggccaccaagaaaatttacttctatggtttcaaagttcatgtcattgttagcgatgacggttacattcttgattatgtcgtaacaaaagcatcagttcatgatgccaaggagacagttgaactgatggaaaatgcacatccatctaattactatcttcttggcgacgaaggctatttaggcaaagaactgcatcaacagctaaaacaaatgggttatgaactttggacaccatatcgtaaaaatatgacaggagctaaaaagcacaatgatcatcaattgatggctattcgcagaacaattgaaagcgacttttcgcttctgacctattacaatgccgagaacaatcgagcacgtagtctgataggctttcaaagccggttggaaattgcaattttagcttataatttggcttattgtctagaaagatttaactagcaccacgcgttatacataatttttacattaagcacaaaaaaaccgctaggtgaccctaacggattaaaaatggcagtaggagtaactttagtagcatcaatggggattgagtataaagttgcgcctaacttgctaagcacgggcaattacatagcccttgcttatttattatatcaaatatcgtttttattgtaaacagtctgtttatcgcttgtattcttaatatcacaagactttccaatccactcattgcttgactaatataagctgcctgcttttctttaaaatctttttcagtaccaccttgagctaaatattcatgatacatagacataaaaatttgatcatcaatttcaagatccatttcattcattcctaaaattggtaactgctccgaaccatatggatgaagcctaattatcttagtcatgcttttaccttctttgtttccttgttctgctttattttttgtttaatccaagtgatccccatagatacacatttaattcctagaaaaatcacaccaattaccagcgcaattctccataaaccatccatcagtgttaacagagctggaaaaatcaggtatattccgaagactacccaaacccacttccaaagatggaacgctgaagcaagaataaagacccaaaccataatccaaaaccaatctgtttgtgaaagtactaaaaacatagcgttctccttagcattaataaactcttattacctttgtctgaacttgaggaatattacctctagtattgataactacttgcaaatcggcttcaatttgccttgcttgcttagctttaaaaacttttatttgatttttaggtacgattgccttaatcactataggggtatcgtcctcaaaagaatgatgatcatttgataataattcaagcatcgaacatccttgattcatatcaacattcattactttaagcgagacagacttataattcacagtttgtttgtctcttttggtaactctattaacatacttttcttctgcgtctgtcttgttaaagactactgctatccaaatcaaactcgtaagaaagtaagccaaatatatgcttaaaaataatttcatagctagctcttttcaactactacgagccattttccttcaccaacatacttaatcttttgattagccttaatgctgataaaatgaccattaagctgcttaacgcgaacataaaagctattactatccaacggttgaattccaagcacctcacttctaaagcgccaagtaaaaactttagctaattctgcaggtgtagctagcattccaggatataaatcatatttattcatcatgaacccccgacatattcatataatctacaaaagctttctcaatcaatttacccatttttgctagatagtctgggttataaattctattgtttaatacttctggactgtttcccattaagcccaatgcttcccctgctaaatagctgtttaactctagcttccgcttactactaagtcgttgcccatctagttcaagatcatctgccatgctaagaaacgcaatggaaaacagtctatcttcaatttcttgaatatcaacttttccatcaagcaagtcttgtgcaacttttttatttttaggattcattcttacaacctcatatccgtctaattatctatttatcaatatcttacgatcttatacaaaagtatcgcaaaaatgatatattaataatgatttactacatagaatttaaatttttaaaggggcatattatgaaagataaacttaagcaatccatcatcgcaattactagtgccaatctcaaaagaattttgtacaatcaaaaactaactcaaagagacttagcagcactaacaggaatctcgatcccatcaattaatcgctattatttaggaaatggcgccataccacaaaataacttggtaaagatcgctaaagccttgcatgtttcacctaatgaacttgatccttcatatcagcccactaaagactttttatctcaactagctgaaaaaactgatgacccagatttaaaatttagaactgattatcttaaacagttaattcagaccagcaatttatctgttcaggaaattgccagtaggctcaatataaagcctattacagtctataagtggctggcaggggtaaatacccctagcaaggaaaatacagccaaattagccgatttatttagcgtcagcgttaattccttagcagatgcctctaaagaaattcgattaactcctcaacagagcaaaatattaaacgctctgccatcagatttaaccaatcagcaaacagatctaatcatttctctgatcaaatccgttttagaaaatgctaactagttttcgatagattcatacatgcttgaaattccactaattagtgctagctggcagttaattctccattgccaccagttaagtatgtattcgacttgatcatttgaatctagcatggttactgagctagttgatacttgcaaatctgaatcttctaggattgttttaatttgaattgcaagattatctgacgttgttttggtttcttgcttaactttaaggtgattatcgcttaaaatgtcgcttaataaacgtgaggactctttcaaattcagcatccaattagaaggcaacaagtcgtcaatagcgtaacctaactcatctactttgaatataaacttttcaaaattttcttttttacctgttaattccatttatttctcccaactgattaaatctatagctctttgtggagcgttatttgtttacatgtttttgaattttatcttagctggtaatttttgcattccagtcaatctcgtgttgatgtttttgcatccactcacaagcttctttagcaaaaataattgtagttttaccagctggcgtttttctggggtttactacgaatccaccatttttataatcaacttctggaaattcatcgaaaataaaagttcttacccagttatcacctttgccacgacaacagtattttctaaactcatcgatattccaagtcttgccagttaagtcttgcttatctgcactaacagattcttttacaatacttttaattagattcgtaaggcttggaaggttgattaatgtgtcagacatatcttcttgcattgctatccccagctttcataatttctatcatttgctaagccatctctcagcatctttaacaaatagctatatggtttgcctaccatgtcccatgacattctttccttgaatttatccttaactgcttgcaaagtatctacgttgcattgatataacagcccccgtaactgtttaagctcatcaagtgttggattggtagaatgattttttagcttatcgttcatccttgcaatggtaaaaaactctttgtagattttttctctttctggatcttcttctttcttcgcagaagaagaattactaactgtattactattaaatgtattactagatatattactagttgataatttattaaatacccctttagtattcttaatacccctatttagttttttaacgggggtatttaatttactaactacccttatagttcgttgcgtaacgttattctttgttgaatacatagtggtgatgtagcctttttcttttaagcttttgactaattgtgatacacgtcctggtgtaattcccaagaaatcagcaaaaagcttattactagcaaaacatccattttctccatcaagactgtcaatttcagtaatcaaggcaacctccatgatagttagatcttcatctagccaatactcagcaggtatccaaacacctttaaatttatgatttgcttcactagtctttcttttcttagtcattgttattgcctttttctttctttaagtactcccataatgcggtcacgatcaaactatttttcgttatgccacgataagaagctaacttggttaattcttcgtccaaataaataggcactcttacgcctgtcgttttctttgatgttgtcatagtgttatcacctcttgcaattatattaaagtgttatcactttgttgtcaatgggcattttatatgtttctttgatgttaaaatgtagtcaaattgataacactattggaggtgcataaattggcttctaaattacctatgtttggtttgagagtagacccagcattgatgaaaaagcttaaatatatagcttcatacaacggacgttctgctaataaagaaattgagcaattaatcatcaaacacgttcagcaatttgaaaagaaaaatggaaaaattaatgcttaatttgtttccatagcacattaacaattaaattattaatgctaatttgtttacgctctgctaatcgtctaagaccttcatacaggtcattagacatgcggagcgttatttgttttcgagtcattgctatccccagctttcataatttctatcatttgctaagccatctctcagcatctttaacaaatagctatatggtttacctaccatgtcccatgacattctttccttgaatttatccttaactgcttgcaaagtatctatgttgcattgatatagcaaacctcgtaactgtttaagctcatcaagtgttggattagtagagtgattttttagcttatcgttcattcttgcaatagtaaaaaactctttgtagattttttctctttctggatcttcttctttcttcacagaagaagatttattaactgttctattagatgatctattaatactgctctttttatgtaaagtgggctttactaccctactaaagcttgctttactaccctcatcaagtgggcttgtccaccctagtaaactcagccttactaggttaggaccagcttttatggttctacctaatattatttttgatttttcacttttagggtttttagctggaactgttatttgctctctcactatcaatcctttatcttcaagcagattcagccagtcattaacagattgaacagaagcatcaagaataccagcaagtgttcgattactcatatgaaaatcacctgtgacattcaacattgaaatgatctcacccatcaaaaggatggatttaggcttttttagcagttccttatctctcgaaatcgatggtgggatcattagaaacgccttagaaccttcaaattccttatccactttaaaatacctgctttccaaattattttatgtgctcttttagcactctttaaacgaaaattttttctagtggtatttctaatttctttgaaagtgctggaagttctacagcctgaaacttatatgttccatgttctcttcgaaaatacttgtctggactggctaatccaagactattagccatatcttcatttgaaaaccctaactcaagtcttttctctcgaattagatccaaattaattcttcttttcaaaatattttctcctttcgtatcttgcgattttcgcaactagtttacatgtattatattacattgccattttcgcaatgtcaatatttttatttgctatttttgcactttttaagcaacatagtgcgatttatgttatattgattgcgaaaaacgcaatagaaagtgtgaaaaaatgaacgatcaagaactacttgctagaaaaatagttagtatacgtaattctcaagatatgagtcagctagaactagcccaaaaagctaatatcgaaagaactgctttaaacaaaattgaaaaaggaactagaaaaatttctagtgatgaattgaaacgcatagcattagctttacaccaatcatctgatgacttattaaatattaataatcatgtaaagactaccaacacagtaactgaatcttctgaatatgatttaaatagaatgattgataatgccagatttttcgatggaaaacctattgatgatcatgacaaagacctagttcgaggcatcctaaaaagaatttataatgagaaatagaaaaaggtgtgcattatggacactgaactaaaaaagttgctcaaagaatcaaacataagattggagtttgcggacttacattgtccaggactacttgtacatggaaaaaacagcaagcctgacgtaatgataattaattcaagctatgatgatgaacaagctaaaaatgtaatcttgcatgaactaggacatatgatatatgacaaagatattcaaggagattaccaaactgatgattgtgctcatacttgcagtgaacatggagcaaattcttttttaatacatgaaagagtcaaacaatatttcgctttgggtaacgattttcaaactgctaattggttagactttgctaaaagcatcggcacacaagactactttcaagtgcaagaagaactaaataaatataaatttaaagagtgaacatatgcttttaactatttcaaattatttaaaacgcccacctgctcaaacaagtaggtgggtgaatttatattaaaacacgtataagtaatttatacgtaacatttaaatagcatataagtaatgtaagtgtatgaggtaatgaatatggcacattttgaaaaaagaggtactaagtggcgcgcacaagtatcttggtataaccctcaaggtaaacgtcaatttaaaactaaacaaggctttttaactaaatcagcagctagaaaatgggctaatgaaatggaagttgcaaaagacgataatcaaatatctaatcaagaccctatttttgctgagtattttaaagactggtacgaaacctataaaattccaggtaaatcaaataatactcaaaatagatataagcacatttatgtactactacaacagaattttggtaaaaccaaaatttcaaaaatcactcgacgttcttaccagaattttatgaattcatatggaaaaaagcatgttaaagatacagtctataagactaatggaacaatacggacttgtgtaaaagacgcaatgagtgaaggattagttaaaattaattttactgagcgaataaatcttacatggaatgaagaacgttcaagaaagattgaatatttaagctttaaagaagtccaaaaacttaaaaaatcacttttgaaagatattactccctcctacataagccgctacatgttactaacaataatttatacaggaatgcgtccaggtgaaattatggtgctaacatggcatgacattgactttaagaatcacactattaatatctctaaatcgtgggactatgataataataaaataatcaactatgattcagatgaaataaataaaaaaactaaaaataggtcatctactaggatcatcaaggtagaccaaaatttattgaatattttagatcaactaaaggttaatcatcatgaacgactattcattggaaaggatggaactataccttcatcaaatgctgtaaacaaagttcttagaaaacaactggcaaacaataagattaaaaaagatggttttcattttcacagtttaagacatactcatgtagcaatgttattatttaggggagttgacttatattcaataagtaaacgactaggtcactcaaatatgagtattacagctaacacctacgcttacatgctagacgaattaaaacaacaatctgatcaacaaatagtaaatattttagatcaaatttaattaaatagataccttttggatacccttgcaaaacaaaaaccgctctagaatagtatctagaacggtttatctatggagatgaggggaattgaacccctgtccaaacgcatctcgtcactgacctctacgatcatagttatattacttgaacttcactagctcaaaacgccatataacagggctagaatgggctagctaacctgttaagactctttttaactattcaggtgaggtagttaaacgtaactcgctaaagttgatactcggtgtcagccacgagtaaaccgacaaggagcaacacatgcgcttaaattaagcagctaatgcgtaagaatttttgttatttgcagttatatttaactgtaacgtttttacgtagtcgtaacctacgaaccgcagtcaatgcgggtctacgcctgtcgaatcccaaaacatccccttgagatacttattcattatagcatagacacacattacatgcgataaaaatgcttaatcaatattagtcaaacgtaccacatcacgttcaatcatcaattcttcattagttgggataaccattcctgcaactttggaatctgtttttgtgattagtccttcactaacactttcattagcttcattatctacaacaacacccatatatgcgaaagcgtcaagaaccgcttttctcacaccagtatcatgttcaccaataccagcagtaaagataattgcatcaacgccgcccatttcggcaatataagcaccaacgtagcgaataatacgattaatgaaaatttttcttgctaacttagcccgttcgctatcactttcacgcacatcgcgcatatctggtgaaattcctgacaagcccaacaaaccagacttattattcatgatataaatcatttcatccatcgacttatgctctaccttcattagatgttgcacgagtgaaggatcgatatcaccggttctagtagccattgtaattccggcaattggactaaagcccattgaggtatcgtaagacttgccatccttaactgcagtaattgatgcgcctgatcccaagtgacagatgactaactttaagtcttttaaatctttacctagtaatttagcagcacgcggtgctgtatagcgaattgaagtaccatgagcaccatatttacgtacaccatatttttcataatattcataaggaagtgaatacaaataatgtactggatcaagattacggtgataagtagtatcaaaaaccgcaacttctggcacatttggtaaaacattcataaaagcttcaattccgcgagcctcagcaggattgtgaagcggagcataatctgacaattcgtagatcttaggcagattttccttagtaataatagtagaatccttaaagtactccccaccattaacaacacgatgtcctacaccgacaatttcagttagttcttcaacaacatggtatccttttaaaaacttgatcaataagctaactgcagcttcttgatctgggatttcagttttttcaacgtgcttagtaccatcagctaacttaatctcaaatgatgaatcttcaagacctacacgatcagccattcctttggcaagaaccttttcatctggtaatgagaataatttgtacttaaaagatgaactaccagagttaattgccaaaacttttttcataaaaattaattcctcttctttcaaaaaaataagtgctttatcaattaatgattaatctttgcataccactcgttaagtttaacattaaattgaattaaagcctcttcttttttcaaggaaccaagtttggtaagcaaaacttcacttgctttggcctcatcaccgtgattttggaaaactaaaactgacttttgattaaacttgttcttaaacatatcatctggcaactctacaatcgccttcaaatagactttcttagttaaccatggcataaaatcagcgccaatcttgcctgacaaaatagacttaggaactaccaaaaaggcatagccgttaggctttaaattattaataatttgttcgattaacaacaaatgagcaaaagaatgacctttcttagcctgattttcaaaattcttggcattctcatcaactggataatagcctacaggtaaatcacttacaattgcatcagcgttaggacacatccaaggcattaaagcgtcttgatgatataactcaatgtcaatattattcagatgcgcagccacatctgtcaaacttaacatatcttcatcgttatcaatccctaccaattgataattatccttagaatgattgagtgccttaagttgagaaataattgaaaacaacaaattccctgtacccacggcaggatcaacgatttccatcttttgatcttttaataatttatgcatcaacattgctactactgtagcaattgcaggtggagtaggcatttggttaacatcaaagccatcatcattaactgcctttaaagttagaaaagtaaagacttgagccttttctttttggctaatttcgtcataatctattgcttgatacttttgacttaattcagccactgttttttcatccggtgcaccattttcaaccttaatcttgccactttctaagttatcaaaagtctctactaaggcttctgtaaatgaaacatttaatgccgtttgcaaagtttgcacacagtctaaaaactgattaaaaagtttttcaaaattttccatagcggtccctccataccttaattattttatagaaagggataaagaggtgcaaggaaagtcaatcatccgttaagcattcgataattaggcgattgttctccatgctagcatgataaatatcttgatacattttgataaacaaaagcgtggtcattaaaactaatacactacttagtaaggcactgccttttacgttatgcgtctttttctttggttttagcatttttcttttcctgttcctcatcaagctgaaaaactaaatctgatacacccttatttttctctgttaccctaataatgatgctatctttagtggttttaaaagcagccttttcaacgttaaataataacggcatatagcctttccctgcaccagatactttaagtacgttctttttatagtattcaattcggtaagtagttgcatcgcctttttgatctatgcacttaaaggaagcactattacttatagctaatttagttactggatacactgccttaattttgtcagcccgcataaaattttctagctgtacataagcataggctacttcattgacatgctgattttgattcaagtttgcttttttaacactcaacaataaattttgtaaaattagcagcaccatcatagtaataagaagcgaaaacattgcttcagctaacataaaacctttactctttgaccgcaaaagtttgtttagtcgttgcatcccaaacatgattatgtcctgccttttgataaattcgatcgtgaactgttacttgctccaggtcagttttagtcagtatatggtaagcataagcacgatctgtttttaattccatctcacgaccatttttctgattttcagctacagttatataaaagcaactaacagcaatcacagcaattataattgctataaagctctcaattactagaaatcctttaacttttatcattccgctactctcccccacagcatttgatatttcaggcttttttccattccgtagccactaaaagtcaccgtacctggtttagaataaccagttaggttgaatttaaaatgatccaagccagtaattttgatattttgatcaactggaatacttttgtgatattttccgccagagaataaaatttgattggatctagctagatatgatacgccaatagtaacctccttgatcgtactgtacctcgaagtttgatcaagtgccgtcgtaactcttttaacagtattatcaaaaatcagtttttcttgatatctttttaactgcaaactaccaatcaacaaaatgccacagcaaacaccaagtgtaattattacttctagtagggaaaagccggctaatttatttcttttcaacaacttcgccactgtctaacgtgaaattctttttagctttagtaatttgatcaccagttaagtaatcgtccttttttagatcttcaaaatctttaggttcaccatatttatccttatataactcaacttgcgtttgcacagtagtcctaaatgcatccgcagttttagtttcagcattcttcttttgattaatcaaattaggcacaattagcaaaatcaaaatcacgataatggcaattaccacaaccatttcaatcaaagtaaaaccctcttgcttgcggcgcttagccataatgtttgctaaatacttcttcatcttctctttcatttttaacttaatcctcttcttcactctatttttttacttttatctttaatgtcactttttctatagtccttgcatcattgaatacattggtaataacagcttcaaatacattccaataatgcataagccaattaaaataaaacaagctggttgaacattgacgactaatttctcaattttttcagttaaatccaaaaataggctacgtcctaataacaaacagcgcttactcaagctctttcgctcagagccagtctgcaataaaactaataaactattaggcaaaaaatcctctgcattaataatttcttctaaattttttccttcagctaaatcgtgccctatcttttgtcccagtgcttgctgcaatgaacctttctcttgatctgccgcatattcgcacattcgctgcaatgaaaagccactagctagcagcagtccaatgtcataaaccaacaaataatgaatatacagcataactacctgcccaattaacggatatttactcagttttttcattgatgaataatcctgtttattgagcaaagtaacgatcttagcaaaaaaatataagcccagcaatacaataatgatcagaccaatcatgaccatatctcctgaatgatcactgctatcgctgaattgtgtcgaaataaacgattgcataaagaccagtaaaatcaccatcattatcgctaaaaccaacggataagataattcagcccgcagttttttcatctgctcctgttttagtcgattcaacgttgctaaatgctgcaaacattcaactaggtttccttgctgtaaagccaaattaacctgagttactgtcgttttagaaaagcctagtttaagcagttcagtactaaaacttgctccttctttcatgcgactagccattctttccatcaactgacacctttttggccacaatgccggcattaattcaattgaattgagcaaagaaaaaccattatctaaactatgttttaaataatccaaaaaggccaattgttcttcgccatttaacttatcctttttggaattgccaatatacttcatgattaatttctcctcctttccacaaacgctctagattttcctgccaattaacgaattcaccacgaaccgatttgcctagctctttttttagcaaagaatctgctgcaatatccatcaagcactttaattttccttgactgactaataatcgctgatacgacactgcagttagacaatttgtcagttcgtcacacctaatacctaatccctctagtcgagaaatagtttgcaaagtacttttagcatgaactgtcgcaaaaaccaggtgtccacttaaagctgcatcaactgctaaacgtgctgttccttgatcacgaatttctccaataattaaaatatctggacgatgccgtaatgccgcctttaacaggttttggtaatcaattcccgcttcgttattgacttgtgcttgcaaaaaagaagactcatgaatttcaacaggatcctcgattgtcatcactactttgttttggctcattttcttagcaatttcatacattgtcgttgtcttgcccgagccagttggaccactagtaataatcaatccgcgactcttagccagcttttcaattgttcccagctgctctggaataaaatattgactatggtcaatcccatagatgactcgaataaccagtgactcttgatcggaaaaatctcctaagctagataaacgcaagaaatattcatgtccttcattctcatatgtcattgcgccaacctgcgggcgacgatgttctgcaatatccatctgagcactgtacttaaaaaaattgataatttcctttcccgtctccaaagtaaaacctgcatattcaattagacccttaccggtccgaaatttaaccatcaagttttcttttttcgggaaaaagaaaatatcacttgctttaactttaattgcctcaatcaataattcactgacaatttctttgatcttcataaaaatcctccttttttgcctcacattatttattacgcaaaaaaaatcgatttttttgtgagaaatttaaaaaaacacaaaaaattttctcaactctaaaaaacgttgatctaacagcatttcaagattaaaaaaccattaaaaaagtacacaaaaaaaaatagcttagccattggctaagctatttcatcattaactaattaatcttcatcagccgctgcagtataaacattttgaacatcgtcactatcttcaagagcatcaactaaatgttcaaattgttccttcttatctgctggaactggagtggtgttttgtggaatcatagttaattcagcatctgctagtttgtaaccatccttaattaaggcgtcacgtacacctgcaaattgctttggatcagtgtagatttcgtatgcatcatcactagtttgaagatcgtcaccaccagcatccataacatcaagtaatacttgatcttcatcagcatcagtagttgaacgatcaattacaatgtagcctttacggtcaaacatgtaagcaactgaaccagtagcaccaagtgaaccaccgttacgagtgaaagcaacacgaacgtccgaagctgtacggttcttgttatcagtcaaagcttcaacaaagactgcaacaccacctggagcataaccttcgtaagtaatttcgtcgtagtgttcttctgaaccaccttcggccttcttgatggcacgcttgatgttatccttaggcatgttgtttgaacgtgccttatcaattaccatacgtaatgtaggattcccatcaggatcaggaccaccactctttgcagccatataaatttcacgagataacttttggaaaattttacctctctttgcgtcttgcgcattcttgcggccttgaatattgtgccattttgaatgtcctgacataaggatccttctttcttttttctaatattaattaacgttattatcttaactcacagtactttaaaattcaatggtgtcaaccatttaaacttgttttttctggtcaaaaaatctgtgtttaataaacaatactagcattatcagcaaaattgccgttaaagcccctgctccatcaagcattacatcgtgcacgctcggtgttctatcacctgttaaaaattgatgatattcatcaaacgcagcaaatgcaattgccataaaccaagttaaaactggtgctacccatttgattttgaaaattcttcttaatcctaaatagccaaaaccacctagtaaaaagtaagaaccaaagtgagccattttgcgtaaaacaaattgagtcagccctgctcgaccatcaacttgcacattatgaatacgaccgccgtaagtaaaattccagccagcaacgatattctctaaccagccaaaataacggttaattttattgtcatgaatttcctgctgctgataagtcattgaactagaaatgaacaatgcaactagcaccaataaagcaagcagtaaaaagattttttctcgtttagtaaaatgaaatttatccattgctatttcttctctcttttttacttcttactttaacaaaaaaacgggttaaacttgacccgttttataaattatttaactttgcttaatgcttcatcaattggtgtgtccccatcatgcataataattacttgatgaatcgtattatcatactttaggctatcaaccaatacctgagcaacatcatcaatcgaattttctccaccttctggagtaaatgatgtcttacccgttgctggcttctccattaagttacctggttgaatgatcgtataatccaaattagtattatgaattaaccattcatcggaaaagtacttagcaatatcataatcaataatgcttgcaagagaaggaatttctgcccacttgtcttggtcaagcgcaaaggcggagcttagttgaacgtaacgcttaacgccattagcttcagcagccttcatcagcttaactgcgccatttaagtcagtttgcaataagtcctttccacgagaacctgctacaaaaatcactgcatctgggtgacctaattcttcggtcagcttattaagcgaatcatgaaaatccaaatgttgaacagtcacatgttctggatcgacgacttctacagcattttcacgtctagctgcagcaattacatcgtatccttcatcaactaatcttttaatgacagccttaccaacacgacctgttgcacctgctacaagtacttgcataatcaattcctcctattcattgtgaagtttaccaactagccttcttaacacctggaagttgaccttgatgagccaattctctcatgcattctctgcataaaccaaacttccgataaactgaatgtggtcgcccgcagcgttcacaacgggtgtactctctagttgaatattttgctttttgcttattacgaataatttgtgatgtttttgccatattaaacctctatctacgtctttctattctttgaggcgccggcttcttatctctagttaacaatctcaacgccaaaataataattccaattgccattacttgtccagtcatacgtttttcttcctttcaatttgctttattagtctcttacttttcgtcagtgattattatatcacttacatttaataagttaaacatttttatcaaaaaaatagaaagcgtttaacactagtcatcaacacatataatagttagaatctatttagatactttcacaatgaggagaaaaaatgaacgaaaagtgtaaaaacaaatcgccagccttcttattcttttaagagagtaaaagtttttaaagagaaggatgagaattaattggacgatttaatttcaacaaataaaatgaagaccatcacttggcctgttttgaccctaatggctttatgtacagttatcggtttagacgatatcatgtacaactttcaaaaccaagggatgcctgttatcacctcttggattatcatgtgtttactttatgtcacaccttattcactaatggtagggcaactaggttctacttttgataaagaaggcggcggactttcttcatgggtacgtggtactgacggtgaattcttaggttacttcacggcttggacttattgggctgcttccattccttatgcagttgactctgccaatgaaattatcgttgacttgggttgggctgtaactggaactaaagacttccaagataagatcccaacttcattgtttgcaattttaacctttgtagtatttattgtctttatcattgtcgaacaccacttttctaactcaatggaatttctttccacgattggtggtggattgatgattatcatggttatcttattcgtgattttagccttcttcggcttggttaaatctggtggccatatggcaaccaaaaactttggcttccattcaattgtgcctaacttcaacttacactactggtcaacagttggtatgttgatttacgccatgaatggttgtgaattggttgcaccatacgtaaccaagatgaaaaaacctaaaactgattttcctaaggccatgattgctttagccgtaatgactgccttcttgactatcttaggttcatttgccttaggtacttacttcgacgctaaccatattcctaatgacttgaagatgaatggtgcttactacctcttcgatatgttaggaaaacaattcggcatgggacacttcttactttacttctgggcttggacatcactgttcttcaattgtgctttggttgcagtcttgcttgacgcgatgaccagaatgttgatttcagacactggtgacaagtacatgcctaagtttttgcgtaaaaaggataagaatggcttgccagttaacggctatatcttaactgttgctctttcatcattcattatgatcttgggtattttcctacctgatatgaatgatatttttaactggttattgaaccttaactcaattatttcaccaggtgtaacctgctggatcttctactcatttatgcgaattagaaagaattccaagaagtttccatcacaatatgtttatattaaaaacgataagttagcttggcttgtcggtttactattactattagtcactgctgctgcaactatccttggctttgcaccacaagatgttaagcagggaactggcttatggtggtatgaattaatcattaatatcgttgccgtagttgtcttaattggtttgggtgctatcttaccaggtattagacgtcgtgaagttgaatacggtgttgcttttgataaagctcaatggatttggatgggaatcttgattatcggttcaatcatcttagatatttggttaggtagcacaaaattaccgatgagaattgctttgattgttatcgaagcagttgttgctttgattttgacttggttagttggtagaagaaagccagctaatgctacgaaataataaattattctattcaaaaaggaaggcacgcaccttcctttttcttatacatattttttcaaaaattcacttacacgacgttgatattctctagggtatgtctcaaaagaacgagcatgttttgcctttttagcaatccacaactgttttggccctttagctgccttgtagtttgcataaaccattttcgtcggcacaaacggatctttcccaccatgaataaacaacattggcttattatttttctcgacagaattaaccgccgaagcatcccctaaataaaagcctagatttgctttagcaataacactcaatccattcacaaaaaattgaccaactggaccgggcaaatgataaatatccttagcttcatgcaaaaattcatccttaacactagtatagccacaatcttcaatataagccttaacctggctcggcatcttaataccacttgccatcatcgtcgtggctccacccatgctgacaccgaagatgacaatcttctgctttttgccttcctcagcaatcaactttctcacccatttacgcacatcatacttttcaggccaaccatagccaatatattttccctgactttgcccatgtgcacgcgcgtctggcatcaacacgttataacccatttgatggaacattgctgcatacggtcccatcgtatccttgttattggtaaagccgtgcaacaaaacaaccgccttatcagaatttttcttcggaatataatttgcatctagccgataatcaccagtattagacttaatataccatctctgttttttagcatcttcataccagcgcttcttctccgctaacggatcttttttatttttactcgagtatttattcaaaacagcttttttaccaggcacaaaggccacattgaaaaaatatgcttctcctactccaatgaacgcaactaatacagcaacgataattccaatcgtcacccaaaatttccttctgtgttttctattcaaaatgtcaactcctatataaaacagatagaattaattatacgcttttaaattttatatggtatattgacatttttatcaaaatattgctcagccctgtacacaaaacttctaattttagaataaaaagatgatgagatctgctgtctcatcatctttttaactagtatagctttaatctaaatctgcaccatttgaagcaataactttcttgtaccagtagtaagaatcctttggcattctatctaaagtacctttaccttcatcatcacgatcaacatagataaaaccgtaacgcttagacatttgaccggtaccagctgatacttcatcaatacagccccaagtagtgtaggcacggacatcaacgccatcttcgatcgcacgattcattgccttaatgtgcattctaaggtaatcaatgcggtaatcgtcatgaatcttaccatcatcactaatcttatcaacggcacctagaccattttcaactaccatcattgggatttcgtaacggtcatacataacttcaaggtagtattgcaagccatctggatcagttgcccaaccccattctgaatacttaaggtatggattcttagcaccagcggcgaagttaccgccaaccttatcttttacttcatgagttgtgataacgttgctcatgtagtaagaaaaggtgtacatatcaactttaccttccaacatatccttcttatcttgctcagtaatgtctaagtgaacattgtgttctttccaaagacgcttagcaaatgttggatacttccccttgcattgtgcatccccacagtagaaaatattttgttcccacatatggcggttagccaaaatatcctttggatctgggattaatgtgtaatcaacgatcccacaaatcatattccctaccacataatcaggatcaatttcatgagccaacttaactgcacgagcactggctacaaattgataatgcaatttttgatatgcatgttggtaaactttatcatcagtcacattgttaccaaaggcactgagcatcagtaaagttgagttgatttcgttaaaggttaaccagtactttactaaccccttgtattcttcaaacaaagttttagcatatttaacatacatatcgatcatttcacggtcgccccagtcgtggtatttttcactgaggtaaagtggatcttcatagtgagaaatcgtaactaaaggttcaatatcatattttttacattcttcaaatactctacgatagaaatcaagtccagcttgatttggcttttcctcatcacccttagggaagatccgagtccaagcaattgataaacggaaggttttgaaacccatgtccgcaaacatcttaatatcatctttgtaatggtgataaaaatcaatcgctacatggttaggataatattcattaggatcaattgcaccaactgccccttcaggaagtcccgcacctggaactcctggtgttttttctaacttaccatttaacttgtaagtcaacattctaggtgcatctaagctacctgcagtagtaatatctgttactgataggcctttaccatcttcatcatatgcaccttcgatttggttagcggcagttgctccgccccataaaaagttctttggaaatgacattatgattctccttttctgaaagcatttacattaattatagactaattggtttgaacttgaccagttgttttaacttctgcggtactgccttgcaaagacaaaatttcttgaccaactttaacttcaccttgagctacttgctgtacagattcatatttcttagaattcgtaacaacaactggagtagtcacttcatagccagcagccttaatttctttaatattaaatttaaccaatggatcacctgctttaacctcttgacctttttctactaaagtcttgaagcccttaccttgcagattaacggtatccattccaatgtgcattaatacttctgcgccatctgtagtgttaagtccgacagcgtgtcctgttgggaaaactaaagcaatcttaccatcagctggggcatgaagcacaccttcgcttggttcaatagcaacgccttcccccattgcaccgcttgagaatacttcatctttaatttctgataatggttttacttcaccgtttaatggtgaaactaatttggttgaaggattttccttttcttcacttaaaattgcttgtacaggagcactcttagtaatattagctgcttcattagcggcgtcagcaactttttgtgcttgttttttattatattcagcatcaactgattttttaccaaagagcatttgaagtgcaaaaccagctataaatgctacaataccggcaataattacgccgacaattgttgtcattgatcctcccttaggattaatgtaggccggaattgcaaagaatcccattgatggcataatgtacaatactgaatgaaaggcaccaatgattgcacctgagactgcaccagcaatacagcttaaaacaaatggcgtttttcttggtaatgtaataccataaattgctggttcagtaacaccgaacagtcctgagaaaaatgcaccagtagctgtttctttaagttttttgtccttagtttgacggataatagctaaaacaacaccaatttgcgcataacaaaccatgcaggataaacctagaattgggtcataacctaatgcggctaaatctgcagtagttacggcaacgattccccagtgaacaccgaaaataacaagtacttgccaaagagcacccattaataaaccagcaataattggactaaagttgtaaacacctgacatcactgcaccaattgcgtccccaacccaagtcattacaggaccaattactataaatgcaactggtaaagcaataatcatagtgacaactggaaccaagaacatttgcacaactgatggaatccactttttagcccagtgctcaataattgaagcaaaccaaacggtaaataatactggtaaaactgtagaagtataattcatcgtgataaccggaatgccaaagaaagtcgtgtgaatctctgaggcaaaagccgttcctttaaacaatgtacctagaacagtcttacttgcagctaattgaaccatagttggataagttaaggttgcaccaattgctaatccgataaattgattcatgtgaaatctacgtgctgcagttacccctaagaatactggtaagaagtagaaaatactatcaccaattgcatatagaatttggtaagtacccgatttagtagaaagccatcccattgcgcctactaaaactactaggcctttaataataccgccagcactaagtggagctagaatatctgtaaaaatgcctgaaatcaaagcaacggctttatccacaaagctagaattatcttcaacgtcatcatcaggaacttgtccaccgccattaaagccgccttctttgacaacagcatcgtaaacatcagcaacttcattaccaatgaccacttgatactgaccaccagctttaacaacagttacaacaccatctgtatcttttaaaacatcatcgttagcctttttttcatcctttaatttaaaacgcaaacgagttgcacagtgaacaacactggtcacattatctttgccaccaacattttgaatgatggtcttggctaattcatcatagttcttagccatttgcctttcctccttaaaataaaaacccaagctactcaaaaactaaagaacataaatgttcaacgtctttcagtaactcgggttcatgcctaatcttcttagtaacatacctaagtaacttagatatttaattatcttgacgactagttacgcgccaaatatgtaaaacaagataaaattcatcatctgaatctaaatcccatcccatttttgcatgtaagtaagtggtgatccgctccgccgtctcatacgctttgctatatttgattttcataaaacctagcattgcaggatcaagtgaagcctcctccttttgcttatttcgtaaaaatctaactaacaaaatgcgcaaatgcgaaacaaacctactatagttaaaggagctcgtatcaagttgcattgaatattgcaattgaataatatcgattatcccacgaatcaaatttgtaatctgaattgtttcttgtacttgagaaacatcactcttagcattaaccaggtgataggtcatcaaaaccgactcactctgcggcaatttaatctgcatctcctgattaattagattgaccacttttttagctgccgcaaattcttttggaaaaagattttgaacttcccaactattgttagcgggagctatatcaatatgatctttaattcgcgtaactgcaaaatcaatgtgatctgctaaagcaagatactgaaagtcattgaacttaatctgaagcagaggttcgaccagctgaagtaccttattagttacttcaattgttttagggtcaaagcccttaacttgatccacttcgtctttagtaacgaagcgacgttcaattttgctttcatcaacaggatcacttttttttagaccaaatcctacgcccttgcctaggactatttcttcttgaccttggttattttcaattaaggcagcactattattaaatgttttaagaaatttcataataattcaccaccttagcaaaaaaagaaaaagctatcacaaataatgatataccaacgcaacattatttgtaatagctaagacctgatcgtatcagtaatccgctcacttacagttattataatagccaatattgtaagcggtgtcaatataattttgtgaaaaaaagcaaaatattttacaatgaactaaaaagcgaggtaattaaaatgaaattcgttcttgcacctgattcatttaaagaaagcatgacagcaaaagaagtctgcattgcaatgaaaaatggtattcaaaaagttattcccaatgcacaaataattgcggtaccaatggccgatgggggcgaaggtacaactgattcactcgttgatgctacaaacggtcgaaaataccaaataaatgttaccggtccgcttaatcaaaaagtatcagcttattatggcatctcaggtgatggacaaactgcaatcatcgaaatggcacaagctagtggtctctcctatgttgcaaaaagtaaacgaactcccgaaacaattttaaagactacaacttatggaaccggcgaattaattaacgcagctttgaagcacaacgtcaaaaagattattatcggccttggtggtagcagtactaatgatggcggtgctggtatggcacaagcgcttggtgttaaattttttgatcaaaatcatcatgaaatcacccaaaagttagcaggcggtgctttagatcaaattgctaatattgatctttcttcaattaatcctcgtattaaagataccaaatttttattagccagtgacgtaaccaatcctctaactggacctaatggtgcaagtagcgtcttcggcccacaaaaaggcgcagatgatacaactgttaaaattctagatcaaaatttatctcactatgcacaagtaattgagcagactattgataaaaacgtcgcccaaatttctggtagtggtgctgctggcggcctaggcgctggcctgatcgcctttactaacgccagtattcatccaggcgtgcaattaattgcccaagaaactaagcttgaagccaagatcaaagacgctgactatgtttttaccggcgaaggcggaactgattttcaaactaagtttggtaaaacaccctttggtgttgctaaaattgctaaaaaatatcacattcctgttatttctttagcaggctatttagatcaaggtattgatcaactctatgatgaaggatttaccgctatatttggcattcttgctaaagcagaagatattgagcaagccctaaaagatggaccaataaatgttacccgtacaactgaaaatattgttcgtttaatcgcacaaaaataagatgagctcgatgcccatcttattttatttcgttaatttcttaattaagccttcacagccacgataaatttcattatacgctgtttcaaaatcatttgtataccaaggatcatcgacatcagcataagagccagcaaactctaaaattttatgttctttatgctctgggtctccaccagtaatgcgattcatatctgcgaaattttcttcatccatgcagattaaatattcataattatcatagtctgagcgagtcatttgactagcacgatgaccacgatcatatggaatatgttttgcaactaattcccgttgtgcacgagcatcaatcccatgacctaaagcatcctgcgtagttgctttagattcagcagtatattgatctgctaggttattttcttttaacaaatattgcatcacggcctctgccattggtgagcggcaaatattgccatgacaaacaaacagaatttttttcattaccttttcttcctcttagttagtctatttataaccggccaaataatcgccgtaataactccaactgttaagccaacccaaatctcctgcgacaaagttacaagaatgccactataaactcgactttgcaatgcggtcatcgcctcatttgaggcaagccacaatgccacaaatgaagcaatagtagctagtgctagtggaattgacgccgaagagcgaccaaataaaatcaaaattgcggctaacaaaaataacaaagccactgcaaaaattgaatactcataaattgtaataatatggttcacatcttctgaatcttccttcaatttatgattaatttgcttgactaaatattcattgataatttcttccaacttacttttactagttaagcctaaatctttagtggtcaattttccctgatcattatatttttcacacaatctatatagatcagcatatgataagttaacttgatatttcggcggcaattgttctaacaatgtcttttccaaaccagatgcttcgagtaactcaacccctgccttcaaattaggattatctgagtcatccactactcgattgattacttctttgcccatcgcctgtgtatcgtttatttttaaattcacattgctagtcattaataaccaaaaagatactgcggctaggccgaccattatcaaacgtagtattattttgacgatgttcttcatctaaaaatcttcccctaacatctacttttttcagatggcaaacaattgcaaggcaccatgtcaggagcatccttttctttcaatttaagttcttgctgcatcgtcttaatatcgcccttagaaagcggtgcttcttttagcaactgaattaatacctcacccttgtgcatatcacacatgttttgcatcatatgtaaagtaacttcagacatcattttgcgctgactaatagtcggcttataaacaaaacaccggccttctttacgcgtctttagcaagcccttttgcactaaacgccgcattagcgttttaattgtggaatcggaccaatcctttttaccttgtagttctttgattacttggccagtacgaacttctcctaaggtccaaataatacgcataacttcccattctgattgggtaatggaattacgatcgtctttagtttctgccataaaacatcacttctaaatccaaattttttactaaagaacaaattttttcaaagcctttgcaatcccgttgtgatcattatcatcagtaacataatcagccttatctttgatctcactaatggcgttacccatcgctactttcatgaagttgggattagaaaacatcgaaagatcattgccttgatcaccaaaaatcatcacgtctttttgggcaatttttagccgtgaagccaaatccattaaagcattaccttttgaagctcccaaggcatttaattcaataatactgtcaaaactgcgaacaatgtcataagtctgaaaagcccagtcggggaaactattccacagtttttctacctggtcagctccttcagttgaagtaaaaccgactttgttaaaagtaaaatcttttggaatttcttttcggtctctaactttcataatattatcggtcaaagccgcattaatttgcatttgcacagataaatcccgatcagttgtaatgaaatacttagtcgtctcaaaatgtacatttacatgacttaaacgctgaaaacgcaacatattattgaagtcttgataattcaattcctgactcattaaaacacgaccagaaattgtttgaattactgcaccattaaagacgattgcatattgatcatcaccttcaattcctaattgcttagcaaagttcaatactcctgataatggtcgtccagtagctaaaacaaccttaatcccattttgtactgcgacacgcaacattctttgcgtttctggcaaaatagtattattgcttgataataaagttccatctaaatcaaccgcgatcaatttaatagccattttaatccctcggatcttaaaaattacatctagcattaattatacaaaaagccgtgatttaactcacgactttttacttatcgattattcaattaggattttacttacccatttccttttcgaccactttaacgatacggtctacataggcatcagtttcttcttgagttggtccttcagccattactctaagcaagtcttgagtacctgatggacgaacaagtacacgaccatttccagccatatccttttccactgcagcaatttcatcaagaattggttggtgttctttccagctcttcttgtcagcaaccggaacattaactaggcattgtgggtaatctttaaagtctttcaaaagttcacttaatgacttaccagtcttcttcattacgagcattaaatgcaaaccggttaacataccatcaccagtattatgataatcactcataataacgtgacctgattgttcgccacctagattgtagccgtgagcacgcatttcttcagaaacgtaacggtcaccaacttgggtacgaacattcttcaagccttctttttcaagagccttagtaaaaccaagattactcattacagtagtaacaatggtatctttcttcaaacgaccatgttctgccaagtatgagccgagtacgtacatgatgtggtcaccatcaacttcattaccattttcatcaacagcaatgcaacggtcagcatccccatcaaaggctaaaccaagttgagcaccttgcttaacaacttcttcttgtaacttttcagtatgcgttgcaccaacatgatcgttaatgttcaaaccatctgggtgagttgcaatagtagtaaagtcaacgccacaatcagcaaacagtcttgagatcaatgcgcttgaagcaccgttagctccatcaataactaccttaattccacccaagtcttctggaatagtattttcaataaattgcaagtatttagctgaaccttcgtggaagtcagttacagtacctaatcccttagcagatggacgaggtaatttatcttccttagcgtcaattaatttttcaatttcgccttccatttcatctgaaagcttcaaaccatcgctaccaaagaacttaatcccattatcttctacagggttgtgtgaagctgaaatttgcacccctgcatcggcgccttgtgctcgtactaagtatgaaagacctggagtagtaattacgccaacctcaagcacttcaatcccaactgaaagaaggcctgaaatcaaggcatattcaagcatttggcctgaaatacgagtatcacgagatactaataccttagcttgttcgccgtcttttttgttcttagttaaaacataaccaccatcacgacctaatttaaaagccatttctggagttaagccttgattagctacgccacgaacaccatcagttccgaaatattttaacatttaataaacaacctttctcaaattaattattcgcattctttactttaattgatatctgtacattttcaggatcaacgcgagcaactcccttaggtaaaactaaagggtaattctttacagttgaatatgagattcctttcagatctacatcaacatccaactgcttaatctttgctaatgtttccttttgtccatacagtgttacctcatcattcttggcagtaaccgaatagactttattatttttttcatttttaggctttaaatttagcttaactttctttttgaaaagcgatattggcaaactagcttttactgtagatggattaatcactgcatttaattgacgcccttttttatcttcagctatcaaaataacttgacgctcataatcatgattaatgccattaggtaaaggcaacttggcaacgatctgatcaatctgatttacttcgcttctagcaccagtaacctcaacttgctgcggatcaacactagccgtaccaatattatatccattagcaacagcatttttattatactctatttgaacgggcatggtacgagattttcgccgttcaatatcaacattaactgttgccgggttaatcgtgtaagataattgactatttagtcccgtaacttctacctttacggtttgcttacctattttcttatgagttagatcaatataagcacggaagctttgagtattaacagtcgaagtaaccaacgcattcgaaccctccaaagttatcttaaccttttcaggataaccaacaacatagtatttatctgtattaaccgaaacttgcagaggaacactaattgtctgcgtttcattagcagtttgccgtgtcttcttagattcaccctgtgtaacaaaacctgtttgagtagagtcaatgtaaaccactaataagatcgcaaacagcaatgagattattctgattacccagcgtttatcccaaaagtctttcatcgatctgcaccccatttccagactttattaatcacacgacgaatccatggaaccttcttctcttccttaggaacaagttgagcattcaaatacttcaaatattcttcacgagacaaatctactaaaaagcgcccgtttctagtaatagttacgccaccagtttcctctgagacgacgatcgttaccgcatcggtaacttcagaaataccaacggcagctctgtgacgcgtgcctaaacgcttaggaatcatgctgttatctgacagtggtaaatatgctgctgcaacagcaattcgattattattgataattaccgcaccatcgtgcaacggcgtattagggataaaaatattaattaataattcaccagaaatatccgcatccagcttgattccagtttcaatataatcatctagccccgtatcttgttgaatcgtgattaaggcaccaattcttcttttagacatgtattgaatcgctttatcgagctcctgcaccatcttaaccgactgtgtatgagcactctcacctcggccattaaaaatcggcgtgcgtcctagccgctctagtccacgacgaatttccggctggaaaataacgataattccgattactgcccaagaaacaatttggtccacaatataagttaccgcatgcagttgcagtaagccggcaataattctaacaataaagataaagacgatcccttttgccagttgtactgctttggtaccacgaatcatcatgatcaaacggtaaactaaataccaaatgattaaaatatctaaagcaatggagaaattattccaagtaaacagattagaaatattaaaatgcattgattgctcctttcttctttaattataaccgccccaatttaccgtgcatacattttaaattctaaaaataggtcattatattcttgggtcttcttaggacctaaatctctaaagacctgtagattcttcaacgtactttgagtaggataaaactgccggtcatctctaacttttttcggcaataatttttgggctgcggtatttggggttgcatatccaacatattccgcattttgcgctgcatttttaggttcaagcataaaattaataaacttaagtgcagcttttttattttgtacagttttaggaataacaaaattatcaaaccacaaatttgatccttgcttaggcacaacataatgcaagtgaggattttgttccatcatttcataagcctcaccagaccaggtaacgccaattgctgcctcattttgcactaggtacatcttcatttcatctgaaataatcgccttaatattgggtcccagactattaagcttagtttgtgccaaatgtagtttaatactagatgtggtattcattgaatatcctaaagaaaccaatgccatccccattgcatccctagctgaatcaactagtaaaatttgcctgcgatactttttactccacaggtcattccaagtcttaattgcccctggcttgacgaatttatcattataaacaattcctagtgtcccccagaaatatggcacagaataatcattattttgatcaaatgacttatgtaaaaaactcttgccaatatatttcaaattaggaatttgcttttgatccaactgatcaagcaaatgagccttgcgcattttagttaccatatactcagaaggaatggtcaaatcatatgccgttccgccttgtttgattttggtatacatcgcttcattggaatcaaaggtctcatagacaacatgataacctgtctgcttttcaaacttttttattaactttggatctagatagtcgccccagttatagataatcaagttttgtttatttttcccggtagacgatttctccaaatgatgggataaaccccaaaggcctgcacaggcaattaaaatagctgcaattgccatcataatctttttcatttaactaggcctcccatcacacgatgatttttctttctgccctttttagtagtaataaaataatagattcctacaagcaacaagacaaaaatgaacattacggtacttaaagcattaatctcaagatcgattccttgtcgtgcccgagaataaatttcaactgaaagagttgaaaaaccattcccagtaacgaaaaaagttacggcaaaatcatctagtgaataggtcaacgccataaataaaccggaaaagatgcctggcataataactggaattaaaacatcactaaaaacctgccatgaattcgcccctaaatcacgtgctgcatcaataagcgacatatccatttcattaagtcgcggcaagaccatcaaaaccacaatcggaatagaaaaggcaatatgacttaacaatacagaaccaaaatttaagccaattcccaatgctgtaaaaaagatcaaaaaactagcaccaataattacatcaggtgacaccatcaagacattgtttaatgctaaggttgttttcttattagattcttttttcatcgcagcaattgcaattgcaccaaatgtcccaataattgttgctattaaactggacaacagcgctagtaggatagtttccaaaaatatcgctaataagcgattatcttgaaataaagtctgataatgagcccatgtaaagtgctcaaatttattcatgtttttaccactagaaaatgaaaagtaaatcaaataaaaaatgggtacatataataggatcaaagtaaaagcaagatagatcttagcgattaaatgtctgtttctcataaatctaccttctttcttctagcctttttgctagtaatcaacatgactaccaccatcagcgcgattaaaattactccaattgtggcccccatattccagttcattgtggtcataaaatactcttcgatagcagtccctaatgtgattacccgattgccgccgatcagccttgttaacataaataatgacaatgatgggataaagatggcctgaacgccgctttcaactcctggacgagaaagcggccataaaacatagcgaaaagtttgccatttactagcacccaaatcctcagaggcatgaatgactgcaggattaatctctttaatcgcattaaaaattggcaaaatcataaacggaatttcaatgtaagtcgccacaaaaataaaagcaaaatcagtaaacaaaatatttacgggaccaataccaaataaatgtaaaaatttatttactaaaccgtcattacctaaaatgccaataaatgcatatgctttaagcagcaaattaatccatgttggcaaaatgatcaataacagccacagctgctggtttttcattttaattaaaaaatacgctgccggatacgaaattaccaacgtcaacaaggtgatcaaaaatgcataccaaaatgagttaagcatcatttttaaaaaggtaccatttttaaaaaattcaacgtaatttctgagcgtgaatgcgttattactatcagtaaacgaataccagagaatcaataaaatcggcaaaatgacaaagagaataatccacagcagatatggaatcataaaaaacatctttttatttttcattttcatccgcctcatacttttctagtcgagcatcaaaatcgtgttggctttcatttaaccgcatgacgtgaatatcttctggatcaaaaaagagcccaacacgttgtcccaatttaactccattagtagaatggatcagccattcattttcattggcatcaattgccttaatctcaaagtgatcacctaaaaataattgcgtctgtgctgtaaccacaatcttcccatcttctggtttaacaatatccaagtcttcgggacgaataactacttcaaccttttcattaggcttcatcccaccatcggcacatttaaatttattattagcaaattccacttcgtaatcatgaatcattcgaccagataaaatattggagtcaccaataaaacgtgctacaaagtcattcactggctcatcgtaaattgctaccggattaccactttgttgaatctgcccatcatttaaaacaaaaatttcatcactcattgatagagcttcttcttgatcgtgcgtaacaaaaataaaggtaatgcctagctttttctgaattgcccgtaattcaaattgcatgtcttttcgtaaacgtttatccaaagcagatagcgactcatctaatagtaaaaccttaggttcattaacaattgcccgggcaatagctacacgctgctgctgtcctccactaagttccgaaatttcgcggttagcgtaaccgtctagacgaaccatatgcaaagcatctttaacagctggcttgatttcactcattggtcttttcttaattttcaagccaaacgccacattttgaaaaacatccaggtgtggaaacaaagcataattttgaaaaactgtattgatatgtctttttgaagcatcaaggtcagtaatatcattaccatcaaagaggacttgaccactagatggctgagtaaagccagcaataattcgcaaaattgtcgattttcccgagccactaggaccaagtagtgaataaaatttaccagattcaatagttaaatttatatcttttaatgctacaaacccatcatcatattttttggtgatgtgttttagtttgataatatccatttccatccctcacataaaaaacagctgcaagccttccagcctgtagcttgtctttgctaaaatattttacttttctttgccgataatcctaacttctgtgcgtaagtcaatgtcaaacttttctttaattaccttttggatcaaatgaattaaattcaaataatctgttgcagtagcaccgcctttattcacgataaaacctgcatgtttcattgaatcttgagcgccaccgatttgtttaccttgtaaaccagctttaataatcatcggaccaacaaagtgcccagtaggccgcttaaagacactgccacaagatggatattcaagtggctgcttataacgacgtaaagcatttaaataatgcatatgatctaagatctctaacttatcgcctgacttgagtgcaaaagtggcgcttaatacaatatcgccattttcttgaactaatgaatgccggtaagaaaagttcatttctgcgtttgaatatgttttaaattctcctgctctggttaaaacattaacgctttgcactacttcttgcatctcaccgccataggcaccagcattcataaaaataccaccgccaatactaccaggaattccagcagcaaattccattccgctcaaaccatgatgagcagccgcaaaagctgtatcgataatccgtgcaccagcatcagctgtaacttgattatcttctactttaatctcttttaattcagtcaaaataattactaacccatcaattccgccgtcacggatgattaaatttgaggcattgccaataattgttaatggaatttcattttcacgtgtgacttttactaattgttctacttcatcagtcgtcttaggaaaggccaaatattcagctggtccacctgtcttagtaaaagtatatctgcttaatgggatttgctctttaatatcaatccctttttctttcaaatcaagtaattccacgctgttgcctccttaaagtttcttgttttattttaccgcataaaggcgttagcttcattaatattaatgatatacttttttaaaaggagaattttatgaattttattgcaatggactttgaaacagccaaccattatccagaaagtgcctgttcacttgctttggtaatggtgagaaataataaaattgttgatcgcttttatacagtaattaatcctcaaatgccatttgacgcgcgaaatattcaagtacatcaaattacagctgaggacgttaaaaacgctccaacaatggcagaggtctggccccacattaaagaattgtatcaaccaggaatgcttgtagccgcacataacgctcgctttgatactaatgtcatgcggcaaagcctggcacgttacggtattgaggagccccactatttggtcattgacactttagctagcagtaaattactcgaaccagaactgcctgaccacaaattagacacagtttctgaggccttaaacgttgaattgtggcaccaccataacgcattaagtgatagtgaagcatgtgctgggattttaatcaagcaagaagagcaatttggtgatgaagcaatcaaaaatttggtttatcagatatgaaaaatctctaggaattttgatcctagagatttttgctttacttattaaattcagttaacgcagctttgacccattcttcattgcgcttaccatgaggagtaaattcaacaacccgtttagttgaatcccaactatcgtccactctggtaatcgtaagttgcaaatactcatctggcaaatcattcattactagttgtggccattcaattaccactaaacctggttctgctaaatagccctccaaatcaatcgaggataaatcatcattttccaaacgataaaagtccatatgaaagagcggcaacttagcttctcgatattcacgcacaatggtgaatgtaggactcttaacaggccgatgtatgcctaatgctcgccctaatccttgagtcatggttgtcttgcctgcacccaaatcaccatttaatagtaataaatcgtagggctgggccgttttggctagggatgcacctaatttctgcattccatcagcagaattaatttctaactttgtcattacttttcatcctttgctaaagcttgtgcggcagtaacaattgctaaatcataaatatcttgttcactgcagcctcgagataggtcattcactggagctgctaaaccttgcaaaattggaccaacagcagtgaagccacctaatctttgaaccatcttataaccgatattgcctgattgtaattctgggaaaacaaagacattcgcatgtccagctacctttgagtttggagccttcttttcactaactgcaggtacaaaagcggcatcaaattgcaattcaccatcagctggaatttctggatgatccttttggaacatagctgctgcatcatgtaccttatcaaccattggtccttcggctgaacccttagttgaaaagctcaaaaatgcgaccttaggatcaatttcggccatcttggcagtcagagcagattgatagccaatttcagctaaagtttcttcatcaggattaatgttgatggcacagtcggcaaaaatgtaacgctcatcgcccttttccattacgaaagcgccggatactcgatgcatccccttagctgcatgaattaattgtaaagctggcaaaacagtgttagccgttgagtgagcagcaccggaaaccataccgtctgcttttcccatcttcaccaacatggtaccaaagtaattaccttgggctaacttgagctttgcttcagcaatactggtatcttttcgtctagctttaacaaattccgctgccatttgatcaagttcatcataatgattgaggtcatagatcttaacaccagctaagtctaaattattttctttaactaacttagcaatctcatctggatttccaattaaaattggttcgataatgccatcttttttcaaattagctatggcagtaagaattcttaaatcatcgccttctggaaaaacaattcttttcttatcttttgctgcttcaacttgttttttgaataatgaaaatacgctcattttttacctcttatgctaaatcagatttacttatcgtttctggcaattgccagtcaatcggcgtttcatcaaagttcttcaatgccatattacaccgcgaaaacggtcgcgagccaaagaaccctcgatcagccgaaaatggacttggatgtgatgatttaatgataaaattcttactttgatcaattaatggaatcttgttttgagcaaatcgaccccacaaaataaagacgacttttccacgctcactcagagccttaattgcagtatcagtcacatcttcccaacctttgccttggtgaccgttagcatgcccatacggtaccgtcaaaaccgcattcagcaaaagcacaccttgatcggcccacttttttaagtaaccgtgattaacaggccgagctccgacatcatcatagagttccttatagatatttttaagtgatggcggcaaagttgtacctggcatgacggaaaaactcattccattagcttgaccaggattatgatatggatcttgacccaaaattaccactttagttttagcaaacggtgttaatttaaaagccgtaaaaatatgatacatatcaggataaatttgtttagtagaatattcttcttttaaaaaattatgcaattcgtgatatttctcacttgcaaaaacaggatccaatacttgatcccaatcgttgccaattaattctttagccaagtcttacaccctcttttcttctcctctttatggtatcattaatttaatactaaatgggagagaaattatgatcaaattagttgcttgtgatcttgacggcacgttgtttaattcagagatggctgtttctgctgctaatgcaaaagctgtgaaaaatgcacaaagtagcggcattgaatttttaattgcgactggccgggccccacgcgaatcacgttcagttctcaaagatgctgatttgcataccagttttatcaatcttaatggtgccctggtttttgacgaaaatgagcaattaatgatcaaacacagtattcccaaggcaaaagcacaacagctagtgcatttactacatcgatcaggcttttactttgaaattttaactgccaatcaggtttatagtgaaaatctagatcaacgtatttcaaatgtagctcatttaatggtagatctaaatcctctacttgattttcgtcaagctgtagcaatttctgctggtaataagactattatgaatatgaaacaaatccacagtttcgataatttattgcaagatcctaaaatagaagtaatgaaaattattgcttttgactctcggggacatgaagcttttaccgatatcaaaaaagaaatcgctacaatgggcgatctagtagtaacttcaagttcatcttctaatattgaaatcaatgagcaacatgctcaaaaaggtcttgccttacttgattatgccaagttaaaaggtatcgagcctgaggaaatcgctgcaatcggtgataatttaaatgatgagagtatgatccgagcagcaggtactggcgttgcgatgggtaatgcgattccagctattaagaaaatagctcaggtagtcaccaagcgaaacaatgaagatggagtagcttatattttaaataaatttattgcagataataacaatatttaaagttatgaggtgagtaagtatgcgattttggctagaacttaatcaggaaaaggattacggtcaaattcctgtgcttaatcaaaatggaaaagctgaattttttattcaaggcaatcttgataatccaaaccacactttatatctaaataatttccgtaaacaggaagtgggacgtctgttttctgatggtgcgggcctaattgcttcgttcacaattgatgtcgtcaaccactctttagtaggcgtaaaaaagttaaacacacctactgcaaacatattctatttgacccaattaaagtatattgttacaggtagtattaaacgtggtacttatacttttcgttctggaatcaagagtgtagcaagtgtccaaacaatcatgggagatcgcggaggcgttttaatttgtgatattactaagcctgaagacgtcccctttattcttttgacatccgttctatttacacaatagcatgttacgcctttgaaactgcctagttttccgccaattggatttgaggtaaatccaaattaaacaaaaaagcagtcatgaaaattttcataactgctcttctagaaagtgatatagatatagatgtatcttctgccataaagtttatatttattaagtaataaggaattattaggcagagactgaataatgaaagttaaatctaatttgattcaacctccatagcttattatacttcgttcagccaaaaatacaagggctagatgttattattttactttaaagatagctaaataatgcatttagagctagcttatagcttaataatttgttatttaacttagtacatctatttttctaaacaagacaactttaatttctacgtaaattgcaataataaattgaacacttttaatcaagctgcttgatagattagatctaattctctttcaaagatttcatctggtgtatgatatgccaatatctttcttggtaaagagttgcaccaggtttcaatgtctatgatgtcttgtagtgaataattgtctattgcctctcccttaggaataaatctgcgaatgagtccattatgtctttcaacggttcccttgtcacaagatgtataaggatgagcatcctgaattgtcaaattaagtgcaacagttaggttatgaagagatatattgcttgaagagttcctctgctgtgtgatattggaggattcggcgatatttgtggttaatggcatcagttgcctgttgaacataagcttttgacttgtctttcatgctcttgcccttagggaagaattgacgcaaaagaccattgcagttctcattggtgcccctttcccatggagaatatgggtgagcaaagtaaatctggcagcccttgatcttggtcatatccgcaaactcagagccattgtcaaacgtgattgatttaaaccaggcaggatgtctgtcaatctccttttgaagcagcctttggcatgtgcttgcccgatagtcaggaatcttgataactacttcaaagcgtgtggttctttcagtcaaagtcattaaagcaggctgattcttgcgtctgacgcctttaaccagatctccttcccagtgcagcggagcttttctgtcttcaacctccttaggacgctgttcaatggaattgccaagatgcttcttgtgcaaagcgtgaccgccatggctgtgatgacgcttgttcctgcgtcttttgagcttcataggcagatcaatattgcttatgtccagcaagccctgatcaatatagcgatagacggttggtgtgctgggacaagggtagcctggcatagtccttttgaattcaccaacgaactcatcgatgctggtggcatcaaatttagctttaaagcgtctggagagcattctcaaaaagacagcataatgcttcaatggattgcgctgatagcagtttttgcgacgcttctcataataaatctgtgcagtatcagcgtaatagtgctcatacaataaatagctgctgtctctttgcaggacgcttccgcgtttgatttcgcgactgattgtcgacttatggcagccaacttcttgagcgataacagtacgggaagttatgccggaatccagcattgcttgaatttgtccacgttgtacgctggttaattgatgatagtgcttagaaatgctagaatttgaattggtcataaagatcttcctttcttgatttttcgtcacttcaagtttaggtcttcatggcctttttgtttaacacttagtgttgcacttcaattttaaatccgggataaggatgagcatagtaaactaaagtatttgatacgtcttctaagcttgaaagatctgcaaactctgagccattatcagtggtaatggttttaaaaatatcattccaatgttcgctgtattgcctttggagttctttaaaggcctgcatgacactgacagaagtcttgtcaggaatacgaagaattaagaactcacgactcatacgttcagataaggttagcagcacctcatcatctttgctcttatgtccgagaactaaatcgcattcccaatggccaaactcattacgtttattgatttctttaggacgttcttcaatgcttctgccaagttttttcttatttctgcgaatacgatgaagcttggtattgcgtttaagcttctctggcaagtcgtaattatgtatatctaatagaccttggtcgacataattgtaaagagtcttagtacagacaacatctctgctgctaaatgcgccaacagcggtggcgcgattactgcacacatcaagcgaccagccgtctttaaagaaatgtttgtggacatagcgcatgaattgagttttcctgagaaagtctgatttacgtccacaatttttacgatgagcttgatatgcatcatgcccttgagtagccttatatcttttgactttgccatgatacagttctacagtaccgcgcttaacctcataactgatagtagaaggggaacagtttaattcacgggcaatggcacgcaaagaatagccatctttcaaacgcaattgaataataactctttcctcgaatgataaatgcttgcctttaatgtgatgattcatggtagaatgtaaagagtccattttgacctcgtttctaaatgttgtgtggtaactacattctatcaaacaggtccgaatggactttttattttttattaagtgttcaatttaattttacaatcagcgactttaatttctattaaaaaatatagtgaaatgatcaagtgatttatcaatggcttgatcatttttatttactttatcaacgaacttgtttttagctatcaaactatataaaaaagagccaaatctaatgatttgaccctaaaaattctagattattaatctaaattattttttatgaattagtcttggtagtttaccaattctaagaatgattctggtactaatgaagcaccaccaaccaagccaccgtcaatatcaggcttagccattaattccttaacgttagctggttttacagaaccaccgtattgaatacgaacgttttctgcagtttcttcgttgtacaagtccttaacagtttcacgaatagtcttgcacatttcttcagcttgatctgatgaagcagtcttaccagtaccgatagcccagattggttcgtaggcaataacaagtgaagatacttgttcagcagttaagccgtctaaagcagccttaatttgagcaactacccagtcttcttgcttgttagcttcacgagtttcaagtgattcaccacagcaaatgattggcttcaagccattagcaaagattgccttagccttcttgttaatgtcttcgtcagtttcgtggaagtaaccacgacgttctgagtgaccaataattacgtagtccatacccatttctttcaagaccttaggtgaagtttcaccagtgtaagcaccttcgtcttcaaagtaacagttttctgcaccgatatgtaagtttgagccttcagcagcttttctcaaagcgtcaaggtcaactgcaggtgcacaaataagtgattcaaccttacttgggtctggtaacttatccttaacagcgttaacgaattcagtagtttgttctggattcatatgtaacttccagttaccagcaataattggtgtacgactcattaatctattgtcctttccttactattacttgtctgaaacgcaagcgatacctggcaattccttaccttcaaggtagttaagtgaagcaccaccaccggtagaaatgtgggtaatcttaggagcaatgcctaattgcttagcagcagcagttgagtcaccaccaccgatgatagtagttgcatccttaaggtctgccaatgcacgaccaacttccaaagtaccttcagcgaagttaggcatttcgaatgcacccattgggccgttccaaacaacagtcttagcatccttcaagatttccttgaacttttcaacagtcttaggaccgatgtcaagacccatcatgttgtcaggaatatcatcaccaacaacttcacgtgaagcatcatttgagaattcagttgcggctacgttatctacaggaagaacgatcttgtcgccagccttagcaagtaattccttagcaaggtctaccttgtcagcttcaaataatgatttaccaatgctgtggccttgagctgctaagaatgtgtaagccataccaccaccgattaaaatatggtctgacttaggaattaagttttcgataacaccaatcttgtctgaaaccttagcaccaccaagaatagttacgaatgggtgtactgggttttcaacagcatcacctaagaacttgatttccttttcaagcaagtaaccagctgctgcaggcttgccagcttccttcatagcagttgcgataccaacgtttgaagcgtgacttctgtgagcagtaccaaatgcatcatttacaaacatgtcgccaagacttgcccagtattcgccaagcttaggatcgttacctgattcacgcttaccaaagtcgttgtcgatgtcttggaatctagtgttttcaagaacgataacatctccatccttcatgttgttgatagcgtcttcaacttctttaccttcgtttgatggtacaaaagttacaggcttcttaagaagttcacttaaacgttcagcaactggctttaatgataattccttcttgtcagcatctgacttaacacgacctaagtggctaagtaagatagccttgccaccgtgttcaatgatgtacttaatagttggaagtgcagcaacgatacggttgtcgtcaccaataacgccatccttaattggaacgttaaagtctacacgtactaagacctttttgcctttaacatcaagatcgtcaacgattaatttagccattataatcctccgattattttgatattttttcttcaaaaaaaggcggaaggaagaatctccctccgccttctcaattaccacttaactatataatcagttaattaaaattaatgattaaagagttgcaaagtgtaataaagtacgtaccatttggcaagtgaatgagtattcgttgtcgtaccaagcaacagtcttaactaattgcttgtcacctgcagtggttaccatagtttgagttgggtcaaagattgaaccagcagtcatgttaagaacatcgctagaaacaatgtggtcaccgttgtaagcaaatgatgggctttcgtacttcttcatagcttcgttaacttcgtcagcagtaaccttcttgctcaagattgataccaattcagtttctgaaccatctggaactggaacacgttgtgcgtgaccgttcatcttaccgttcaagttaggcaataccaagccgatagccttagctgaaccagtagtatgaggaatgatgttttcagcagcagcacgagcgtcttgttccttaccactacgtgaaggaccatccaaagtcatttgagtaccagtgtatgcgtggatagtagtcatagtagcaacttcgataccgaattccttgtccaaagcgttagccattggtgcaagtgagttagtagtacatgaagcagctgaaacaatcttgtcatcagcagtcaaagtgtcttcgtttactgagtaaacgatagtcttcaagtcgttaccagctggagctgagatcaatacacgcttagcacctgcatcgatgtgagcttgtgacttagccttgctagtgtagaaaccagtacattcaagaacgaagtcaacaccatcgttcttaacccatggaatgttttgtgcttgtggttctgcgtatacgtggtaactcttaccgtcaactacgattgaatcttcagttgatgaaacttcgtggttgaaagtaccatgagtagtgtcgtacttaagcaagtaagcaagcattgctggagtagtcaagtcgttgatagcaacaacttcaatgtcctttgacttttcgccaaggtccataatacgacggaatgctaaacgaccgatacggccgaaaccgttaataccaattttaactgtcataacctaaagtcctccttaagaactataaacaacatttattttaaacgggatttcatttcccctttaaaatcatatttgaggcgccctcatcagtgattagccaggtttgatgaggcgcattaggcatataagctttaattgcttgagcctttcgggcaccacaagcaaaagcaaatatgtggggtattttgtataggttctcgaactgcaatccaacctgggtgatgcggtcaacaaccttgccatgttcatcgaagaaacacccgaaacattcggtgacggctctcttctcacgaagttcagatagcttaattgaattatagcctctgcgctgtgccatttcttgagctaacccaataccatgaatcacagcatcactttgagaaatgtcttgcagaacatctgcgatcgaggactcacgaatcaaagatttgtaagcatcatctgaaacctgctcaggtaaatataatgtcttataagtacctgaagtcttagcagccatttcttggacgattgtattactttgcgtctctacattttcgcccaaagctcctcgacctggaacaaattccaactggcgattgttagctaaatctggtgataaatacttagcagatctagctaacgccgctccacctagaattgtaactattgaatggcctaaaggcaagagtaaattcaaagctgaacttaatttttctcccatctcctcatatactcggtcttggaaatccgcattaccagggacgatcaatgttctttcaatccctaattttttggctaatgctacttccgtttcaccggcattaaagaggcgatcaagcaatggtcctgcatcttttaatgttttctcacccttttcagttaaaaacatcccaaaactttttgtttcaatcaatcctaattgacataagtactcagtctcagttctgatgtttctctctgaaagccctaaatgctgagcaacactccgacgtccaattggcgcatgtagcgaaatctgctcaaggacaagatacctttgtcgaagaatctttaagacgtcgggaacgagcgcttcgagcaaagaaaagtccgaatccatcgttccctcctttccatgggacatctatcgaccacctacgtgtcgttttgtgtcccagaatgcttaaaaatataagagaaacgtacttttcattcaattcatacatttcccaatcgacactgttagtataacaatgtatttttcgtaattcaagaaaaagatacacgattttaaaaaagtcgtaaatcgagtaaaatcatttttatttcattactttttttgatatactaccacttgtgaatcatctgggcccttagtgtaatggatcgcacataagattccggttcttagaatctgggttcgactcccagggggcccatataactacatgttgaagactaccgccatctcggtattcttctttttttataccaaaaaagcattcctcacggaatgcctttttcaatatcacaattatttagtgcttgtagtcatcaactcagcacgttgtgctaactcagtgtacaaagttgagcctgaaacagataaaccttcaatttcacggcgagtgttgaaatgatggctacccttataagtaccatttgctgctacacggaagatgtagtcgttaaaaccaatatagaattgattgtggttgctgtcataagcaaaaccttgaactggtgaaccagttacgaaattactttgagtagcaccgatttcttctggagcccaagtgtcaccatttctagttaacttccagtattcatattggtgacgaccaccattgtggaacaatgcatacatagtgttgtcgccaacaaaggttgcattatggaagtaacgaggatatgcactgctgccgttccaggtcttaacagtccagattttgttaatcttcatatcactctttcttacttgcataatttcttctgaagctgttgaattagcagtcttattgttattagccaaaacataaatgtagcttgaagaagagccaagtgattgaccatgacctagcttaatgtatggtgaaactttaatattgtttgcgtagcttctaaaagtgctccatcccatagtagttaagttttgagcagcatatttactcttaattgcattcaagttgtaagaaacaagatgtcctcttgagtcgctactgctagtgtacatagaagctgtaaaaataccatcattaacagtaataccttcaggaattaccccaacttgtcccattgcatcagcagcttgaccatagcctaagctgacaaaacgtggttggaacaaacgagtgcgcaaagtcatgccgttacctgaatagctatttgagctagtttctgaacgataaccgtgtgcctgattccaatttcttgatgatccctttgagccaccattccaagtatgaactgccttaggaccactcttaacagaagcacctgcactagtaattccttcatttgtatctgaacgaacagttacattaacgcttgcctttgccttaccatatgaataatctaccttagtagtgccggcacggcttgaactaacagagctatgtgaaacattaaccctatctggattaattgcagtaccttgtccatctgttgcatagttaattgcatccctagttggaaaactgtagttgctgttgtgaactaagctaacatcttgagctactgaaatttggtttctagcaaaaaagttttgacttacccaacctacattgcgtccatcgacaataatgtaccagaagttacctttcttggtagaaacatacttcttagattgaatttgaccatgcttaaagtacttggtatttgaaaatgcacctgatggtccttttttagatacattatgataaatagcgtaattaccattgccagcaatcttagtaactgccttgctgtagcttttggcatctaccttgctttgactaatggcaaaaacaccaccaactaatgcagcactggccacaaaagttaataacatctttttcccttttaacatccttattaatcctcccatatgaaaaaatcacgttcattttagcacaaatttatcaaatgaaacatctaattattaaaaaatttcctgaacaacaagactttgaaaacgcttctgttatataattaaaaagttcacataaatatataaatagtaatagggagaaattttatggtcgaatcacaaaataattccaaaaagatgatgtggaccaccctagcaatgatggccttctctaccgtgtggggctttggtaacgttgttaatgggtacgtctactttgacgggacaaaggttgtctttagctggatcgtcatgttccttctctactttgttccttatgccttaatggttggtgaacttggagctaccttcaagaatgctgaaggtggggtttcctcttgggtaaatgccactatgggcgcaaaatgggcctactacgcaggttggacctactgggcttgccacgttgtttatatttccagtaaaggtactggtggtttaagagcgatggcctggggtatcttcggaaatacaaaatggtatgatggcttacctaccgcttggacacaatttgctacattagtagtcttcttgcttttctgttgggttgcaagtcgtggtattccagtattgaaaggcctagcaacaattgctggttcttcaatgtttatcatgtcaatcttattcatcattatgatgtttgccgcaccagctattaatccttctgctggtttccacagtattgactttaactggaagaatttgatgccaaccttcaacgtaaaatactttacttctctttcaatcctagtatttgccgttggtggttgtgaaaagatctccccttatgttaataaggttaaggatccttccaaaaacttccctaaggctatgatggctttagcaatcatggttatggtatctgctattttaggtacttttgccatggcattaatgtttgaccctaaggtggttaatgccaaccttaacgaatacatctctaatggtgcctacatggcatttgacaagctgggcgaatattaccatgttggcggcttgttcatgtacatctattcatggtgtaacgtaatcggtcaattctcaacattagtaatcagtatcgatgcaccacttagaatgcttttgggtagtaaagaagctaaagaatttattccaaagggcttattaaaactcaacaagcatggtgcttacatcaacggtatctggatggttgttgtcctctctggtggcttaattgctattcaagctttagtaccaaatgctcaagctgttatggcacaattagttaaattaaattcaactactatgccacttcgttacctttgggtatttgcggcatatgttgctttaagaaaacagcagcaaaagttcaacactacttatcaaatgactaaacatcaaggcttagcctatactgccggtatttggtgttttgtagttactgctgcatgttgtatcttgggtatttactcaccagatccatttaccttattccttaatatcttgacgccaatcgtcttgattgcattaggtttaattttgccaggaattaagaaatatcaagaagcaaaggcaaaataaaatttaaatacagaattttaaaaaggaagcaatttcaaaagactgcttcctttttagtgtatatttttatttattagcccaagcatttaccaatgccttgtacttggcaacgctaattcctgcacctttactgcttcctaaatatgaatcagcatttccataaccagtattgcttacattggcaaatcccattactctataatttctgttaatcaaattcaagtagtgtcctgccattttatagccgttcgtgccctctacggccgcatcataagttgccgtccaagttggactatacttcgccggcttcaacgaatgattcttttttacatcataattccaacttttcttttcagagaaccaagtatcaaccggatctaaacccacactttgagtagcgatgttttccaaaccaatcgacttgaaataatgagtatgctttaagccaccacgtttttgatagtcagcatttaacattgaggctgctgtcaaaagtggtgacacctttaatgaccgaaccccttcacttctacgtgctctattgacactattcaaataaggcaatacagctttaatattcttagcactagttgcatcatcatttgaatgcaagtcaacgtattcattgtaccaacttgccttaggctttttacctaagcgacctgttttcaataatttcactgctgatctagcagagcttctttgccctttagtcaaagatttgtttttagatagatatgtcataaaatcaacggcatttttggctgccttaactggcttggaactcaataccgttaaagataaggtcatcatcacagctgatgcacctgcaattaaaaatcgttttttcattctttttctcccatattaatatatgtgaactacgatttaattgtagcacatacactaatggaagattttccttttaaattgcattatccatccatcttaacgtattgtcctttttcatctacaacacctttgaaatggtgcatgctgccatcttcggcctgaaattcacctaagtcaatttccccatagccctttgtagaatcagtaaccttaacatcatcaaaagtttctctgaaaaattgatgaacaattctactcttcaaccgtatatcctttgaatgctcaaaggctgcagacaacgtaaagccctcatctaattgttccttgataaaaacaattagatacaaggtcgctaaattatagcggcgcacaccactttgatcatctgaaatcggcttaatgtagcccttagtttcccaatagcgcaattgcctttgcgaaacaccggtcaatttactaacttcaccgattccaatttctaaattttgaaaaatgtcatgcataatttttttagatttcatcctgataccaccttacagtatagttatattttatatattgttgttatcttttgcaacacttgtgttaatttatctaacttatttgtaagattatttgacaatggaaaattttaagcctatagtttttatagttaacttttataagagaaaggaatattacatgaacaagcaaccaacggatattcatggaaaagcttataatcgaaacctactagttttagttttaattataggttctttctgtactgtattaaacggaacactgctttcaacagcgcttccttcaattatgcgttcatttaacatcagcaccgcaactgctgaatggctttcaacagcctttctgttagttaatggtgttatgatcccaatttctgcatggctaatcaatcgcttcggttcaagaaaaatgtatttgtcagccatgtcaatcttctttattggaacagtgatcgccgcaattgcacccaattttggcaccctgcttgctggaagaatcattcagggattaggcgtcggcgttactatgccacttttacaaacaatcatgctttccatcttcccagctaataaacgtggtgcagcaatgggaactgtcgggattgttattggcttagcaccggcaattggaccaacattatctggttggattgttgataacctttcttggcgttatcttttcagcatcattgccccaattgcgggaatagtaattatcttagctttctttttaattaaagatgttttaccaactaagaaagaaaaaattgatgtttggtcagtaacaacctctactctaggcttcggaagtctgttgtatggtttttcagaagctggtaacaaaggctggaccaatcccgagattttaggatttattggatttggaattatatttgtaatcctattcggtatccgccaattgaaaatggatgacccatttttggacattaccgtttttaaacactttgaattttcactggcagctgccttaagtggtatcaccaacttagcgatggtcggcattgaaatggttttaccattatatattcaaaatttgcgtggcgtttctgccttccattcaggtttaatgttactacctggtgcattgatgattggtattatgtcgccaattactggccgtttattcgacaaatatggtgcacgtaaaatggcaattactggtatgactttgttgaccattgggactattccattcgtctttttaactgaacaaagttcatacacgatgattatcattctttacgcaatcagaatggtcggtgtagctttggtaatgatgaatgttactacatctggtatgaattctttaccattaaacaagatttctcacggtactgctgttaacaacactttcagacaggtattaagttcaattggtactgcaattttggtatctgttttaactacaactaccaataataatatgcctggtaaaagtttacttcatgcactgccacttgaatacaagactagagcaatcagtgcaactttagacggttttcatgcttcatttgcaatgagtatcctcttctcattaatcgcattagttctttcattcttcttaaagaagggcaatcgagcacgtgaacatcaagaaaaggtggatggttaaatgatacttttaattctaatcgtagctgcaattatgtttatttactttaatatcatccctggaaaaaggcatacttctattgcatggctatcattaatcgtaacaattctttgtgttgttggcattgtagaacatgattataatcactggggaatgaaaactgaaacaacttcaagcactaatactctagtttccagtgctactcctcgcctgccaattttgctttatcagcctttaggtaatggaactgaaaaagtttacctttataaaactggtcagcttcaaaagaagccaaaatctattaaattacgcgtggtgctagttaaatcgttttagttaataaaaaagtccaatcttgttagactcgacttgtaaatagtaataatagaaaagagtctgatctgattgaactgccttaagcttaagcgttttagccaccatttacaagttagttttaaagatttagtgataatttgtcggcactggtatcgtttgtatgcaccggctgagtttactcatcggcgaaatattgatcaaattaaaactacggacagtctgattttggctttacttatctggcaagctaagacaggaattgaatcacaaagaagattctgtgaatgtttcaattgtttatcacactcacgttttaatcggcgttcacgtcagctattgcaattgatttatcagatacggcaagaaatgaataaaaaggttgacctgaatggacagttcttgatcattgacagctttccggtacctgtttgccaaccaattcgaaactatcgtgctaaaatttttcgcggttatgccaacattggttataaggccaccaagaaaatttacttctatggtttcaaagttcatgccattgttagcgatgacggttacattcttgattatgtcgtaacaaaggcatcagttcatgatgccagggagacagttgaactgatagaaaatacccatccatctaattactatcttcttggcgacgaaggctatttaggcaaagaactgcatcaacagctaaaacaaatgggttacgaactttggacaccatatcgtaaaaatatgacaggagctaaaaagcacaatgatcatcaattgatggctattcgcagaacaattgaaagcgacttttcgcttctgacctattacaatgccgagaacaatcgagcacgtagtctgataggctttcaaagccggttggaaattgcaattttagcttataatttggcttattgtctagaacgatttaactagcaccacgcgtattaaattagataaagtatcgacaaaagtaaaacgaagcagccaaccaaaagtaacgattaagactactcgctacacctatagcaatacctttaatcaaataatgtttggcgtctttggtcatgacaaggagttaaaacacagagaatatattttttctattccctccaactggaaagtaatgtcagttaacgatgccaagcagttgcaaaaacaaatgatgaaaaaacagcagtttttaaaacaaaaatcagcccaataaaataatgaagctcaaactttgatcatgatatgaaccccgaaattcggacatgaatttcggggtttttatttatggctaaattatctaaacatgacaaaattgatatttacaatagctagaaaaattaaattcattttaactcaaattttaccatatgatttaagttaacttaaatcacctttacaaacgcttatgaaatataatttaactaaatctaaatgtagaaaattatttttatcatactgcctatttcaattgcatcctatcattaaagtaatttttataagccaaatagccactaatcacggctccaaggccagtggcagaaagtaacataaatgtaatcataatctgatacttaattgcataaatgggatttacaccagcaaaaattaagccggacatcattcctggcaaatttactaatcctacagttttagccgaatctatcgtaggctgcatcgcagtcttaatgctccttcttaaaattggcatcgatgcagttttaatatcactacccaaagccaacttttctaaaacttgttgatgcagatcattaaagctatcattcaacgctttatagcataagccaactgccaccatttcatttccagcaatcatccccgtaatgggaatgacctgcatagggactggtttaattacgccagaaaaaatcagaattcctaatgtcacgtaagtccctaccgcttcggctattatcgaattccaaatattccgccccggattaggatcacgctgattagcattccaagatgcattaaaaattatcacaatagttgaaaccaaagttagccacaaggcattaacatgaaaaataaacttcaaaacgtagccgattacgactaactgaattatcgccctaatcacgctaattaaaatatccttggttagtcctaatttttctttcgcagaaattccaatggaaactaacaccagtgcaaaagctaatactaacgaccagttgctaactacaacatttttcattcgattattccgcctttttttactcttaaaatattacttgcttcatcaatttcactttgatcatgtgtaacttgaataattgtcacgcctttctcagaaacatccttaatcaaattatgtacaatatctttactttgattatcaagcccggtagttacttcatctaagagcaatatctttggtaaaaatattatgtttcgaattaacgcaactctttgcttttcaccacctgataaagcagtaatctttttatctaaaaaatcagcagagagatcaacttgattaagtaaatcagctatttgcttgtcatttacatctacttttctaatttcatacgggaaaatcaaattatctcttactgtttgcccaaataaagacggctgctgaaaacaatatgaaacttctctacgatattgaactggatttaaggagctaatgtttttttcttgatatagaatatcgcctgaattagcactaattaaatttgcaatcaatcgtaaaatcgtactttttcctgcacctgatgggccaattaaggttagaaaatcgcctttattaaccttaaatgatacatcttgcaatatttgttttttatctgcactatattggatatgttttaattctaatattttcattcttttgcctaactaaataactcatttttctaattatacaactaaaaaaataaaggaaatccaatattttcattgaatttcctttatttaaattaatatcgataatgattacttagtcaacttttgtttactttcaagtaattcagcacgttgagctaagttcatgtataacttgttgttgtaggttgcgataccttcaatttcacgaccagtgtggtattggtaagtatccttaacttcaccatcagttgcaatcttagcaattacgtcattgaatgcaaggtagaagttattgttcttggcatcataagtaaacccttgagtgtatgtgtttgctacaatgccacccttagttgcacctaccatagttggataccagttatcgcctttgcggttgaattcccagtattcagtttggtctttttctttattataaagagttgtgtaaagcttgtgatcatttacaacaacaccattattgaagtaacgaccgtctgaatcactaccgttccagcatttaatagtccaaatcttgttaatgcacatatcgctcttccgaatttggattaactcttcagacatattgctcttgtatgaaaccttattattgttatttagaacgtaaatgtatttatcagttgagcccattgcttgaccgtgaccaattggaatatatggactaactttaatgttcttaacgtaagaattgaacttcttttggctcatatcaagtaagtattgtccgttaaatgcattggttaaatggttaagattatatcctacaatatgaccattgctaatcagggtactacttaataaactagtgtacaaccagccatttgacatggtaattccttcaggaatatgacctacacggttaatatagtcatcatttttaatgtcacggtaaacacttaataaaactggttggaagaagcgagtagtgaaatctaattttccgctttcactatcataagcatgcttattcttatcaggagtaaaatcagtcttagttacatagttagcagaactgccgtagtaagtcttccaggatttcaaatcgccgttaaatggcttagcttggacgctatcagcatcagcaattccttccttagtactctttctgacagttaccttaacagttgcctttgctttaccatagctatatttaacattataggtacctggagttgagcaatcgattgcatcttctgaaatcttaatatctgctgtatcaattacagtacccatataattggttacataacttactgcatcagttggatcaaaatcgtagtgactattttgtactaaactgatagtctttggtacagcgatagcatctcttgtaaagtagttttggttaacataaccaactttacgaccatttacataaatacgccaataagttgcatcctttgtcttaattctctggtcagattgaatatgagcatattgataatcgctagcatcagcaatcttaccactaggtttaccattactaatctttttataaacaggataattcttattgctacctactttaaccattaagtcataagaagtacttgtttgagctggtcccttcttcgcactggaatcagtcttagcagtatctgtattactatcagtagttttagaattatctgcaaatactgcatttgtagaaccaattaacaaaccaacacccagtgctacagctgaagtagcagttaaaattttatttgaatacttcaaacctatcctccgtatcttatattttgcattttacttttatattataatatataaacactgttagctaaaatacatttttattaccattgttaccattgagcttctttatttgacactttcattacgaagtgatttaattagcactgtacttgaaagagtgctaattaatacgaaatcaattaggaggcaaatttatgctagtacctacagttattgaacaaactgctcgtggtgaacgtgcttatgacatttactcacgcttattaaaagacagaattatcatgcttagcggtgaaattaatgaccaaatggctaactcaatcatcgctcaattactcttccttgatgctcaagacaataccaaggatatttcactttatatcaactcaccaggtggtgtaatcacctccggcttagctatcatggataccatgaactttattaagtcagacgtatcaactattgcaattggtatggcagcttcaatggcttctatccttttgactagtggtaccaagggtaagcgtttcgcacttcctaactcaactgttttaattcaccaaccattaggtggtgctcaaggtcaacaaactgatatccaaattgcagctaacgaaattttgaagagccgtaagaagatcaacgaaattttgcacgaaactaccggtcaacctttggaaaagatccaaaaggatactgaacgtgacaactacttaactgctgaagaagccaaggaatatggtttgattgacgaaatcatggttaataagaagaagtaattaattattaaaaattattcacactctaaaaggagcttgcactcattgtgcaggctcctttttcttattctcttaaactctcagctaactcatgtagtttcttaaatcggtgattaactcctgacttcgaaatcggaccatccggaatttgattagctacttcctttaaagttaattctggatgcgccaatctaaaacgcgctaaaacttgcaatttctctggtagatcatctaagccgttttcttgttcaatcagctggatgtcttctacctgcttagctgaagctgaggctgtttttttcatattcgcggtatcacaattaaccaagcgattaaccgaatttcgcatatctcgcataatacgcaaatcttcaaagttaagcattgcattaagtgcacccactatatgcaaaaagtcgccaatttttgcggcttcttttaaataaacaatatagcctcttctacgtttagttgctttagcatttaaataaaaataattattcatcaacttacataaatcctcattatggtcctcataagttgaataaatctccaagtgataacgactcgtttctggattattgacactacctccggctagaaatgcaccgcgtaaataggacattgctccttcacgtgaagtcataattctctgcggaattcgcgttaccaaacctttttcaggatcccagatttgtaagttttctaggatttcttgtaccttctgattcaatcgtaccaaatattgattattttttttcaatttcatcttgcgcgagacaatcagcaatggctcaataccataagcaatcttaatcagcttaaaaattcgtcgagcaatcgcaggattttctgtagttatatctaggctaaattgatgatcgtgcaagtttaatacaccattcattcgcaaaaaagcagctaactctgctttggcatgctctggatgcacctcaagcgaagttagctcctttttgacttcactagcataactagccatcattttccttcattcttttacgtgacattgattcaaatgccagattaataatttcttttcctaccttttcaccatcatgaaataccaatccatgacgttgatcgataaagtcatcagtaatgacacggcagttttgctttcttaagccttcaaagtcattcttaacaggctcaagataagcatcataatcttctgggtgaaatttgctcatatcaattttggcaccattaaccagagcggtattgatataatttccacctaagtgatcgttaattacctgtacgtgttccgcatcactaaagtgatctgtctcaccacgctgagtcatgatattgcaaatataaataacctcggcgtcagtctcacgcactgcttcacctaaattagagatcattaagttaggtaaaattgaagtaaataaactacctggcccaagtacgactgcatcagcttgcataatcgaagccagtactggtaaaacagctctaggctcttcatccgaatcagtatcggtcacccagacacgcttaatccgcttatctttagatgtgatttcagtttcaccagactccgtagttccatccacgaattctgcgtttaaagtcaatggttcattggatgctggaaaaacatgaccatcaattttcatcatttttgacaaagattgaactgcatcaaagatattgccatgcatttcattcaatgccgcaataattaaattaccgattgcatgtcctgaaaaaaaggaatcggatgaatcaaatcgatactgaaaaatattcttttcttcctgaggtaagtcactaagtgataccaaaacattacggatatcaccaggtggaactacgttaataaagttacggattgaaccagatgaaccgccgtcatctgaaaccgttacgattgcagtaatttccgcgttttgatcttttaaggcattcaaaataactggtaaacccgtaccgccaccaattacgactacacggggacgtctgcctttaatcacgcgaacaatccttgtttctccatatggcacaggtgcgcacctactttctaatataacgactcacttcacggtgagtaatatcgactggatattttttagctaaatctcgtgccaactgttgggcaattgaaacactccggtgttgacccccagtacaaccaattgcaatggtcaacttttccttcccctctttgatatatccagggatagctgtttcaagcaaatcaagcaattttttataaaagacctgtgtttcttctttgttcatcacatagtcaaatacacgcttgtccagtcccgtaaatggtcttaattctgaaatataaaatgggttaggcaaaaaacgcacatccattacaatatctgcatcaattggcatcccatacttaaagccaaatgacatcacttcaattgaaaatggctgccgcttgcgatcactaaatgtattgattaatttttgctttaattccttagtcgacaagtttgacgtatcgataatataatttgatctatttttaattggcattaaaatacgacgttcttcttgaatgccatcaagcaagcgacctttgccattattggctaaaggcggaagacgccttgtttctttataacgagcaaccaagacatcatcggaagcatccaaaaataggatagtagcttgcacattgccattatcttcaagtgaattaacttcatccaataaatcgcgataaaatgtcttaactcgtaaatcaattactacggctaccttatgaaagtcattggaattattaattaaatcccaaaaactacctaataaagttggaggaagattatcgactacaaagtagcccatatcttctaagtcatgagcgaccacagttttacctgctccgctcatgcctgtgactattaataattgttttttctcatcagccatactgaaatcctcctctttacaaattatatcataccgggtgtgtcataattgtgcaaaaaaaagaagcctttcggcttaaatttttatcaaatattaacggtgcataaatgcaaccacaatttcattaatgccaaagactaataaccagaatgcaactaaccatactaagcttaaggctgcgattactggattaataattaagaagaaggcaataatcaaacttaaaatattcaaaatcaagttaaatacaaagtatccggttgaaaatgcacgtaagtgccatgaccaagcaatacctacaactgaatcaacaaagaaccagattgcaaataagtaagcgatagtcaaaccaccaatatcatatgagcaaatgaacaagataccgataatgatatctaatacacctgacacaattgctacccaactacgtgagaaaaattcacgaaagcgtgagtaagcagccaaccatacaataccttgaacgattgatacaatagcaaaaatcaagacaaatgcatgcaaccctttagctgggtgacgtaataacacgaacgcaactacgaccattaagataccggcaataaatgcgccccagtcaaagccgtgattatctctagaactagaaaaaatatccatttttattcctccttgcagactattttacacttattcaaggttaataaaaactattggctattgtcttctagcctatttttttgcttcttttgttagtttagtatcacgttctaagactggtttcaaatactgaccagtatagctttctttaactttcgctacttcttctggcgtaccggtagccacaatttgaccgccacgttcccctccttcaggacctaagtcgatcagccaatctgcatttttaattacatcaagattatgctcaataattaaaaccgtattgccttcatctaccaaccgctgcaaaacttctaataaacgcttgatatcatcggtatgcaaaccggtagttggttcatcaagaatatagaaatttttaccagtagaaagcttttgcaattcagcagctaatttcattctttgagcttcaccaccagataaagttgtagcggattgacctaatttcacatagcccaaacctacatcaacgatagtctggagtttacgctgaatcttaggaatattttcgaaaaacttagttgcttcattaatcgtcatatcaagcacttgagcaatattctttccccgataagttacttccaatgtttcagaattataacgagtgccgtgacaaacctcacatggtacatatacatcaggcaaaaagttcatttcaatcttgataattccatcaccatgacaggcttcacaacgtccacctttgacgttgaacgaaaatcttgctttagtataaccacgcaattttgcttcattagtttgagcaaataaggttctgatatcatcaaaaacactagtataagttgcaggattactacgtggtgttctaccaatagggctttgatcgatatcgatgattttttcaatattcttgtaacccttgattgacttatacttacctggcttagttgaattattgtttaatttttgggctaaagcgcgtttcaagatcatattaaccaaagtagatttaccagaacctgagacaccactgaccacaataaatttgcccaacggaaaatcaacattaatattctttaaattattttcttgagctccagtaattgtaatctttttaccattgcctttacgacgcttcaatggaaccggcacaaattttttaccagacaaatattgccccgttaaagaatcaggattctgctctacttctttaggagttccttgtgccataactttaccaccgtaaacaccggcaccaggtcccatatcaaccaaatagtcagcttgccgcattgtttcgtcatcgtgctctaccacaattaaagaattgcctaaatcacgcattctctttaaagaagcaatcagccgatcattatcacgttgatgcaaaccgatagatggttcatccaaaacatacataactcccgataagtttgagccaatttgagttgccaaccgaatacgctgagcttcaccaccagacaaggtattagctgatcgagaaagagttaaataatctaatcctacactatccaagaatgaaagacgatcgcgtacttcctttaaaatcggcttagcaatcatagtctcttgctcgcttaatttgacgtccttaaagaaatcaagtgctttatcaatagaaagctccgaagcttccgcgatatccttgcccatgactttcactgctaatgctttttcattcaaacgcttgccgtgacaagttgaacaagtaagttcagtcatatatttgcccatcacatcacgcataaacttggacattggtcgtttataacgccgctcaacattggccattactccttcaaatggttgaacggtatcattaacgccaaagtcaccagttacatggaatttcaccggcttagttgagccatgcagaataatgtcgcgttgacgtttagttagtttattaaaaggcttatccatcggaatttttaatgccgtgcaagcttgttccaacatttcagtatagtaattggaagtcttccatggagccagtgcaccttcagctaaagattttgttttgtccggaacaaccaaatcttcgtctactgctaacttcatccctaacccatcacaatcaaggcaggcaccaaatggtgcattaaaggagaacagtcttggttccatttcacccacagtaaagccacactttggacaagcataatactcagaaaagttaagcatttcaccaccaattacatcaacattcatgtagccatctgacaaacgaagtgcagcttcaatagaatcaaataagcgagacttaatgctatccttaacaatcaaacggtcaacgacaatatcgattgagtgacgcttgttcttagctaattcaaaatcctcaccaatttcgtgcatctcaccatcaacaattacacgaacatatcctgcacgttgcactcgcttaaatacttccttgtgttctccacgcttagcacgaataactggcgctaaaatttgaattttcgttctttctggtaaagccatcactcggtcaaccatctgatcaactgattgtcgttgaatcagcgtcccatcattaggacaaattggatggcctactctggcccaaagcaaacgtaaataatcattaatctcagtgacggtcccaactgttgaccgtggattatgtgacgttgttttttgatcaattgaaattgctggatttaaaccatcaattgaatccacatctggtttatccatttgccccaaaaactgtctagcataactagaaagtgattgcacataacgtctacgcccttctgcataaagcgtatcaaaggctaaagaacttttacctgaaccagataagccagtaataactactaacttatccttaggaatagttaaattaatgtcttttaaattatgttcacgtgctccgcgaataacgatcttatcatttgccattaaaattctttccttttcttgatgatttttgcaattccataattgcatcccgcaagttagcagcttcttcaaagtcaagcttcttagctgcttcttgcatttgctcttgcaagttgctaatcattgtcttcttttgcttagccgtcaattcatcaaaattaagatctgcaaaactatcagatttttcttctttttcactcgacggtttagtaatcgaaattacgtcttgaatcggcttaatgattgtcttaggcgttatgccatgctctttgttaaattccatctgaattttacgccgacgcttggtagctttaatcgctgctctcatggaatcagtaatcgtatcagcatacatgattacttcaccattggcattacgggcggtccgtcccatagtctgaaccagcggccgatatgctctcaagaagccttccttatctgcatccagaattgctaccagtgaaacttccggtacatcgattccttcccgcaacaggttaattccaattaagacatcgaacttacctaaccgtaagtcacgcaaaatttgcattctttccagcgtcttaatatcagagtgcaaataacgtactttaattcctaagtccttcaaataatcggttaagtcttccgccatttttttggtcaaagtagtaacaaagactcgttcatgacggtcaatccgtttattaatttcgccaactaaatcatcaatttgaccctcaattggccttacttcaatcttgggatcaagcaatccggttggtcgaataatttgttcaaccttatgatctgttcgttcaagttcataatcacctggggtagctgagacatacaaaatttgattaacatgcttttcaaattcggatagctttaatggacggttatcaagtgcagatggcaaacggaaaccatagtcaatcaaggtttgcttacgattacggtcaccattgtacattgctctaatttcaggcatagtagcatgtgattcgtcaattaaaattaagaaatcatctgggaagaagtccaacaaagtatacggtggctctcctgcttttcgtccttccatatgccttgaatagttttcgattccgttggtatagccaacttcacccatcatttccatatcataggtagtacgttgcttgattctttcagcttcaagcaatttgccttcgccttcgaactttttaacctgcaatttcatctctttagaaattgctcccaaagctcgccgcaattgctcgtcattggtcataaagtgcgtagctgggaaaagcgaaatactctcacgctcaccgatcacctcaccggttaacgaatcaacttcaacaatgcgatcaatttcatcaccaaagaattcaattcgataagcatgattagaattgccggctggaaagacctcaactacatccccgcggacccgaaaacgaccgcgttgaaagtcaatatcattacgatcatattgaatatttaccaaatcacgcaacaaggtattacggtcatattcttcgccttcatggatcatcaagacactgcgcgcatactctttaggatcacccaaaccatagatacaagaaaccgaagcaacaactactacgtcattacgctccattaaagctgaggtagtagcatgccgcaactgatcaatttcatcattgattgccgaatccttttcaatataagtgtctgattgtggaacgtaagcttctggctgataataatcatagtatgaaacaaaatattcaactgcattattaggaaagaaacttttaaactcaccatatagctgccctaccaaggtcttattatgcgtaataactaatgtaggcttattcagcttagcaataatattggccatggtgaaagttttcccagtaccagttgcaccttccagaatctgttctttatatccttttttaaatccagcagtcagtttatcaatagcttgctcttgatcaccggctggtttaaactttgatactaattcaaatttgcgatttttttgtcgtttaatcataaaaaactcctcaagaaaaaagttggacaagcatagtccaactttttaattagtatctatattttactaccgcgaacgtgctttcgcacgaaaaatgcttaattatttaagtaaatctgctaaagccttttgataatcttcagctgccttttctgcagtggcaatgtcttttttgtttacaccaacataggccttaattactggttcagtacctgatgggcgaagtgctacccaggtttcatcatctaagaagtacttcaacacattagattctgggaacccttctaatggtgtctttttgccattttcaatagtttctttttgcaagaaatcttgaatcttaagcactttactaccgccgatttcagttaagtgctcattacgcaacttgctcattaattcggccatcttcttttgaccaccaatacctggcatttcaattgcacgggtaatttcataagcaacgccatacttttgccaaatttcttgcaaaccatcaaagacagtcatcccacgtgaagcatagtatgaagcaacttcggcaaacatcaatgcaccctgcatggcatccttatcacgagcaaatggtttaaacaaatagccatagctttcttcaaagcccatcaagaacttagcatcaccagctttattcatccggtcaacttcttcaccaatgtacttaaagcccgtcaaaacatgcttagtcttaataccaaagtcctctgcaatcttaaatggcaaagcactagaaacaactgaagtaacgatctcataatcaggggttaattgaccattttccttcatatgagccaataggtagtaagccatcaaagtagcaatttggttaccagtcaaaacttggaaatcaccatcagtttttctaactgctgcacccattctatcagcatccgggtcagtagcaataatgacattagcatttacctcatttgccaacttaaaaccaggttcaaaaacatcacggtattctggattaggcttaattgtggttggaaattctggatcaatgattgattgacttggcacaggaatcacattatcaaagccgccttgtctgaaagcacgatcataaagcatcttgcctgtaccatgaagtggagtataaatgatctttaacttgtcagcgttggccttaaccatctctggatcaacagttacttgcttcaattcattcaagtaatcttcatcaacatcttcacctattaactgcaaggtgccattagcacgcaattcttttactggtgcagccttgacagcaaaaatatcagttactttttgagcataagcaaaaagtcgatctgcattatctggtgccatttgtgcaccatcttcaccgtaaactttatagccattgtattgcttagcattgtgtgaagcagtgatattaattccagcgaaagtatgcaaatgacgtactgcatatgaaagttctggtgtcggtcttaaatcatcaaataagtaaacatgaattccgtgtgcacctaaaactctggcagcatgttctgcaaactctcttgagtgatatcttgaatcaaaggaaatagctaccccacgctttttagcatcagcaccattttcttcaattaaacgagctaagccttcagttactcgacctacagtaaacaagttaatccggttggtaccgggttcaagacgaccacgcatccccgcagtaccaaaattaatatcctgtccaaaggcatcttcgatccatttttcatccttgcccaaagtatttaattgatcttttaaataatctggtaaattagtagctttttgccattctgtataaatttctttagcgtccatcaatgtcctctattcattaaaagttggatttctaaagcgctttcaaactgttaacaattttctattatctgctattaattataaaacttattagtcattaatttaagctttagacaaaaaaagacatgtccaatacgaacatgtcttaatgaaaaaacgaataaatttaatttttcttgtcttgtaagtcttggtagtaattatatgcagcttgaccagctacactaccttcaccaactgcattagcaatttggcgtaaatctttttgacgaacatcacctaaagcaaagataccaggcaccttagtttccatatgatcatcagttacaatccaaccatggtcatccaagataccaagatccttaaaaggttcagtttgtggtaaaacacccacgtaaataaagacaccagcaactggaatttctttttcggcaccattttccttatcgcggtacttaacccctgtgactttcatgtcatcgcctaagatttcttcagtttgtgcattccaaatgaaatgcatcttcttgtttgcaaatgcacgcttttgcaaagttggttgtgctcgcaattgatcacggcggtgaataactgtaacgctcttagctaattgtgaaagataaattccttcttcaattgctgaatcaccaccaccgatgacagctacatcttcatctttaaagaaagcggcatcgcagacggcacaatatgaaacacctttgcctgaatattcttcttctccaggcacattcaaatgcttatgatctgaacctgtagcaataattacgatcggtgcacgatactcattgccatcatcagttttaactaacttatcctcgccatcgagttcaacactttgtacgttgccatacttataatctggttcaaacttcatcattgtgtcgtacatcttttgactaagttctggacctttgatttcagaaaaaccaggataattgtcgatagcatcagtattgttcatttgaccgccatagggaccgcgatcaagaacaagaatctttaagttagcacgcgcagcatataagccagcagtcatcccaccaggacctgcaccaataataattacgtcgtatttatcagccataatctatccttctttctacttacttttgataagcaaataatacaatagatttaacttcttgccaactattttgcttatcttttataaacgaatttcaggctttggttctctacccatcattttcttaatttctgtatcaacatcagcatcttcataaagaacacggtagattgcctctgaaattggcatatcaatgcccttttcttcacataattcgtgaacagctttaacagtagtagcgccttcgacaacttgtcccatatttttcaaaacgtaatctaaagtcttgccttcgccgatttgtttaccagcacgccaattacgtgagtttactgaagtacaagttacaattaagtcaccaatacctgacaagcctgagaaggtcattggcttagcaccaaagtattgcacacccaaacgagtgatttctgctaaacctctagtcatcaaggcagctttggcgtcatcaccatatccttggcctactaaaatacctgcagcaatcgcaattacgttcttaacggcaccaccaacttctacacctactaaatcatcgttagtgtagaaacgaacgtagtcattggagaacaattcttgtacccgcttagcattttcttcattagttgatgcacatgcaatcgcggttaaatctttttgagcaacattttctgcgtgactaggacctgaaattgcaacaatcttatcttcatcatctggataaatttcttcagttaaaatttcagaaataagcttcttactgcctggttcaatccctttagttgcagtaactaacagtggcttagcacccgtcttatctaaaaccttgcgtacgtttttagcaacgattctaactgccttagttggcaaaacaaataaaacaagttctgccccatcaagagctgcttccaaatcaccagtagccttggtattctcatttaatttccaatccttcatatagtggctattggtgtggtgagcgttaatttcttcattaacactatcaatgttaccgtaaagagttacatcgttaccattatcggctaacattgaacccaatactgaaccccatgaaccattacctaaaactgcaatctttgtcattttttctctcaaactttctaattaaaatcttttattaattctaatctcttgaatacgggtattttaatccactaccatccaaataccattttggattaacgactttccgccgataaatccataaaataattgtagcaataaagaggattaaacttaatgcctgtgatactcgtattataccaaaaatatacagactatctgtcctcattccttcaacgaagaaccttactacactataccaaagaagataggtcatgaaaacttctccctgcttgaagagatgttttttatgacgcaaggatagaattaagattaagccaatcaaattaaaaaatgattcgtacaaaaaagttggttgataatacgtcccgcctattttcatttgctcaataataaattgtggtaagtgtaagctttgtaaaaaatgaagagtagttggtgcgccgtgcgcctcttgattaacaaaattaccccagcgtccccaaatctgagctgccatgactccaggagcaatgatatccagcattaaaaatggaggtagcattcgtttataacagaaaatcaacagcacaattaagccggcaattaaaccaccataaatcgcaatcccaccattccaaatcgcaataatttgctcgggatgctgtgaataataaccccattcaaaaatcacataataaatacgtgcgccaacataccctaacggtactgcccacaatagcaaatcgacaaaatcatctggaataatttgacgtttttttccttcgttaatcgccatccagcaagctaacataatggctactgccataatgatgccataccatttgacacttaaattccctaaatgaaaggccaccggattaattactaaattagtcattatgcggcaccttattcgtatcttcttttgagtgctctgaaatcagactagtcaaattattatcaaaagtttgagttgcatcatagcccatcttcttagctctgaagttcatcgctgcaacttcaataataatttcaatattgcgtccaaccttaactggaatattaacctgtggaattggtacattgcagatttcacgcgtattttcttgaaaacctaggcgatcataattagcttttggatcccaattaaccaaattaattaccagttggatttctgttctattttttacggcaccggcaccaaataaattcatcacatcaataatgccaattcctctgatctccattaagtgctttaagatctttggtgcttcacccacaacggtattatggtctttttgaaaagcatctactcgatcatccgcaattaatctgtgtcctctttgaactaatcccaaagcagtttcagacttaccaacaccagatgcaccagttaacagcacacccatccctttgatttcaaccaaaacaccatgaatgctggttcttttggctaaacgagcacgcaagtattcagttaaaatactggatatgtaggtagttgactctcttgtacgcaaaattgggattttgtgttcctctgctgccgtagttaattcttccggtacaggcaaagagcgagaaatcaaaaaacacggtgtagccttagtacacattttgttaaagacatgcattctaatatcatggtccaagcgtgccgcatatgaaatttctgtccgacccaataattgaattcgttgcgcaggataaaaatcaaaataaccagttaattctaatccagggcgataaatatcagaaacataaatttcttcatctttgatatattcctgtccttggtaaacttcaaggatactctgattgtcctggatcaatttgcttaatctaacttcatcagccatattaggcctcctaactatttatcaatatctttagtggtgacatttctagctttttttcttggtctaggaccagaagtactagtagccttaaaccactcacgataacttccactacttggcatattatcttgatttttccttccagtaaaccgataaataagccaaatgattaaaatcgcaattacagctactggtaaaagtaaaataaatgccttaaatagaacaaacaataaacttaaaataattagcgctactaaaacaagcgttacaatttccattaaactcattttttaacctaatctggattctcttgactaagcaaccactgtaaataggaataaataaacggttgcaattttccgtccattactccttgagcgtcagctgtttcatgacctgtccgcaaatctttcactaggttgtaaggatggaaaacatatgacctaatttgtgatccccagccaatctccttttgatcgcctttcagagcctgcttttgcttacgctttttttcttcttctaagtgaaaaagctttgctcttaattcattcatcgcagtttcacggttttgcaattgtgaacgctgtgcctgagacgtagtcacaattcctgttggtaagtgcgtaattctaacggcactagaagttttattaatatgctgcccaccagcaccactagagcggtaaacatcaacccgtaaatccttaggatcaatatcaatttgaatactgtcatcaacttctggaatcacttctacagaagcaaatgatgtatgccgtcttttagccgcatcaaatggcgaaattctaaccaaacgatggacaccattttctgatttaagcattccgtaagcatttttacctacaattcgcgcactaacgctcttcaacccagcttcttcaccaggctcataatcgttgatttcaaatttaaaaccagctgtatcacaataacgttgatacattcttagaagcatctgtccccagtccatcgcttctgtaccgccagcaccagggtgaatttccatcaaagcattatggctatcatacttacccgacaagagcaggtctaactcataattatgaaaatcttcttgcagcgtagctagatccgcttcaacttctttttgcaagtcaggatctggttcttcacgcaaaagttcaaccgcagtagtttcgtcttcgtagctagtttgcaattttaaaaatgaatcacgtttttcctttaatcggttggtttcactaattaatttttgcgctttttcctggttattccaaaaatcaggctgcgccatcttgttttcattaatttcgatgctttcatcaatcgcatctaagtcaaagagaccccctaaagtgatttagacgtttttttagttcatctaacacactttgaatttcactaatttccatttttacctaccatcttttattttattgcaaaaaaagggaagctcttaactcccctttttctttattaacgactaagattttgtctaatttcagccttcatgaacaaacgagttacatcaaattcaatatttgaaatcatttcttcaaacattctgtaaccagaatcttgatattcaactaatgggttcaattgaccgtatccacgaagaccaattgattgacgcaactgatccattgcatcaatatgatcagtccaacgatcatcaaccacacgcaagataactaccttttcaaattcaagcatttggctaggatcgcctaaggccttttccttatcttcgaagttttgctcaacaatgtcataaagcttcttcttcaaatcttcaacactaatagtcttgaagtcaattgagtcagttaccttgtctgaagtcaaacttgaggaaatgaaatcgcgtaatgagtcaagacgccattccttgcgttcaccttgagtaaacattgctacttggtgatcaattgttctgtgaatcattggaattaaaacattcttcaatgacttatcagcttcaatgacctgcattctttcgccgtagataatttcacgttgaatacgcataacatcatcgtattgcaaagtttgcttacgagtatcatagttattaccttcaacacgtttttgagcagattcaacttggcgagtaatcaagcgactttcgataaccttatcatcatcattatctgataaacgatccaagaagtccttaactcgatcaccaccaaaacgcttcatcaaatcatcttcaagcgacaagtagaatctggtgtaacctgggtcaccctgacgaccagaacgaccacgaagctggttatcaatacgacgtgattcgtgacgttcagtaccaataactgccagtccaccaagttctttaacaccaggcccaagcttaatatcagtaccacgaccggccatgttagtagcgatagttacggcaccacgttgaccagcgttcatgatgatttgagcttccttagcgtggttcttagcgttcaaaactgcgtgaggaatacctgctttatcaagcatcttactcaaacgttctgaactttcaatggcaacagtaccaaccaaaacaggttgaccattagcgtgacgcttcttaatttcttcaactacagcgtggaacttagagtccaaagttggatacaaaatgtctggcatgtcttttctggcaattggacggttagtaggaatcgtgattacctgcatgttgtaaatttcacggaattcttcctcttcagtcttagcagtaccagtcatacctgacaacttcttgtacattctgaagaagttctggtaggtaatagtagcttgcgttcttgattcttcttgaatcttaacgccttccttagcttcaatagcttggtgcaagccatctgagtaacgacggccttccattacacgaccagtgaatgagtcaacgatcaaaacttcgccatcttgaacaacgtagtcgatatccttaagcatgatgtagttggcacgaagagcttggtcaatgtggtgaaccaacttttggttttcaacatcgtacaagttctttaggccaaagtgttgacaagccttttcaataccagttctggtaagtgaaatagtcttagttggccagtcaatcttgtaatcgccgtgatcttcatcatcgtcggcatcatcatcgctcttgtcttcagtcaaagtcttaacaaagcggtcagcacggatgtaatcactgtttgcttgttcagcttcaccagaaataatcaaaggagttctagcttcatcgattaagatagagtcaacttcgtcgatgatagcgtagttcaatggacgttgtaccatttgttccttgtaaacaaccatgttgtcacgcaaatagtcaaagccaagttctgagttagttgagtaagtaacatcacagttgtaagctgcacgcttttcgtctggtgacattgagttcaagttcaaaccaacagttaagccaagccacttgtaaagttgacccatttcttcttcgtcacgacttgaaaggtattcgttaacagtaacaacgtgtacacccttgccttcaagtgcgttcaagtatactggcatggttgctgtcaaagtcttaccttcaccagtcatcatttcggcgatgttaccgtagtgaagtgcaataccacccaaaatttgtacgtggaatgggtaaagtcctaatacacgcttagcaccttcacgagcaactgcgaatgcttctggtaaaagatcatccaaactttcgcccttctttaaacggtcacgaaattctggtgtctttgcttgcaattgttcatcagatagcttgctcatttcatctgcatgagcttctaccttagctgcgattttttcaaatttcttaagttctcttttatcgtcgttatatagtttctttaaaatatttaccattaaatcggtccttatatgtcgtaaagtctaaaaatacagaataattttaacatgtttatcagcaaaataaaaatattctaaacaaaaaaccccacgctcaaacaaacgcgaggttttgaattaacgagtattttaactcaattattcgttagtttcaattaagccgtaacgaccatcgtttctacggtaaacaacgctagtgccgttagtttctgcatcttcaaaaacgaagaagtcatgttccaacatgtccatttgtaaaatagcttcttctggatccattggctttaagcttacacgcttgttacgaacaatatcaaattcgctaggcttcttttcttcttcttcaggttgttctacaaagaaatcttgtaatcccttttcacgactctttctatttacacgagtcttgtactttctaatttgacgttcgagtttttcagaaacgaagtcaatgctacgatacatatcatccgtggtttcttcggctctcaaaactaagtatggtaaaggaatagtaacttcaactttagctgagtgatcacggtatactctcaagtttacgtgtgcaatcacatcttgattcaattcgaagtacttctctaacttgtttaaccgcttttctacataacttctcaaagcatcagttacttcaatattttctccacgaacattgtactttaacatataagattctcctttcaccgctatgcggtttttctttacaaatttattataccaaaaaatgtaagcgtttcataacaaatctaatgacaaattgaaaagctttcaattttcatttcgggaaaaccctgctgtaaacggtcccgcgcgtgatatagcgtgcgcccggtcgtgtaaatatcatccaaaattaatacttttcctgaaactatattttccttgattttaatatttttatcaatcaaaaagctttgaggcgttttaagccgctcctctttgtttttctcaccttgggcatgactacccgattgtttaatcagaagcggtgtcagcggcaaaatatcagcataaatagcaaaaattgtatcaaactgtcgtcttgattgatgttcaggtgaagtgggcacgggcacataaaagtcatagttagttttacacaaatagtcataacacaaatcttgcaatacttcccgcaaaacataatctccacgccgcttatacgcaaccatcaagtcatgaaaagcagaattataacgatataaagcatgattatgcagaatattttcgccataaatggcttgccaatttcgacaatcgctacacataaagccttgacctagttccttatcacagccagagcagcgattgtctgctaacttttcaaattgttttaaacattgcaagcaaattttactttttcgcgctgttttaaaagaaaaaagttgtgcaaattgtaccggtggagtaaactcctgctcacataataaacaagttctcatctattcatccccttgatctgcttaatactctgtcgaatattcttggtataacgatgataacaatacaaaactaagcccgtttggtcatcgtgagcccgaccaactcgacctgcaatttgcaccaaactagcagcggtataaattgcatcatctgctgcaataataattacccaaacatttttaaaagttacaccacgctctaaaattgtggttgtcaacaataagtcatatttacgatcacgaaaagcctgtactttttctaatcgttgcggatcttgtgcatgaacaccggccaatttaattttattttgcaactttttccgcaaagcttcttgataaagcggaatttcttcaatccgtggtacaaacaaaagcaaaggatgaccactttgaatgacttttttaatctcctgcattaatttaggatgaatttgtcccttccgcaaaaacggcctgataaaaagcctttctcttggtacaggcaataatccaccatgaaaacgccgatttaagcgcaaaatttctaacttccctgttttagcttccaaaagcaaatcgttcgttggcgttgcggttaaatacattcgagtcccagttgttttaaccgcatttttggccgcaaaatgtagttgcggattacctacataaggaaaagagtctacctcatcaattaccaataaatcaaaggcacgataaaacttcattaattggtgtgtagtacaaattgtcaactgctctagccctatttccttaaattcacggccatgatacttaccgatctcaacttgggcaaacgctgccgaaaatcttggaaacagctcatttaccacatcaattcttggtgtagcaatacaagcgcgctgtccttttttcatacatcgagcaatcaactgaaacaacatctcagttttacccgccccagttacagcatgaaccaatgtattttttctttgttcaaaattttgtactaatttatccgaaatattctgctgcaatggggttagtttaccttgccagcttaatcccccgtttttaacatgagaaaaagtattattactgtcttttctaataagccaatcgccctcatttgcacgtcccaagccaatacaaccacgacaataatatttaccattaggcagtcgactattaacttggctgccacagcgattgcatttacctttttcaattactggaattttgcggcatccctcaaatgtgctagaatcctcttgactaacaatccattgacgacctgataatagagtcaaatcttccatatttttacctccctattatctattacgcaaaaagaggcgattattttgtcagaaaaggaaaattttttaactattaaagaaaacggcaccggtgaattaattatcaaaaagagcagattcattgccaatattgcccgcaccactactactgatgcggcaaatgattttattcaaaaaatctctaaaaaatatcgcgatgcttcgcacaatacctttgcctacacgatcggcttaaatgacgaccaggtcaaagaaagcgataatggtgagccatcaggtacggctggtgttcctgaattaaaagcattgcaattaatgaatttaaaaaacgttacagtcgtagtaacccgttattttggtggaatcaaattaggagcaggcggtttaattcgtgcctattccaatagtgtcaccaatgttgttgaaaaagtcggcgtcattaaacgcgttttacaacaagaattaatttttagcgtaccctataaccgcttcgatgaagttgatcattacctaaaacagcaaaaaatttttattgccaataccgaatacggtgtggatgttaaaattcatatttttgttaacgatgaccaacaagctaaacctaaggaagacctaactaatttattggccggacaggttacctttactaatggtgaaaaacgctataatgaaattcctgttgaagctaataattatcatgaacaataaaaagagcatttggatatttccaaatgcttttttgctacttattattttttttactcttcaattgatctggtttttcgtctcctaagtgccaaacttcaattgttggatcagttttactcttttgattaataattttctgaattacatgcatcaaaggatggtatttttcacccaataaaccaattgattccacaaaatactctaaggcaatcagcaagcctaagatcagaagccaagtgccccaagttggcgaaagcaggaataataaagaaataaatgagaaaaccaatgataatgcgtaaatagtcaataccgtctgtcggtgcgttaaccccattcgcatcagctggtgatgtaaatgatgcttgtctgcttctgaaattggctttttgtttagctttctccgaatcattgcataaacggtgtcagtaataggcactcccaaaatgataattgggaccaacaatgaaataaaagttacattctttaaccccttcagagataaaacggcgatcataaaaccaatataaagtgcacccgtatcacccaagaaaatttttgctggatggaaattatatggtaaaaagcccaataaacaggcagctaacataaaacaagcaattgggacatatagctgatgagtgtgcaagaagaaataacctacgatccccatggtagtcagagagatcattgaaaccccatcagctagcccatcaagtccatcaatcaagttaactgcattagttaaagctaagatccaaaaaatagtaattgggaaactccaccaacctagatttacttcatgtgcgatgaatggcacctttaacacattcattctgattccagctaaaaagtagataatcaatgaagcgataaaaatcccaaacattttttgtctaggttttaactccaaaatatcgtcgatcaatcccgtcaaaacaattacgcttgaagcgagtaaaatcgaaaaaatttcatgagtcggaaattgctcacgcaacagaacaaaagtaccgatattaaaagtaacaaaaatccccagtccaccaatcgttggcattggtttcttattaactcgccgggcattaggattatcaacagctcctaagacaaaggcaagccgtcgaataaacggtgtaattgccgctgaaataattactaataagaataattcaacaataattttaaacatatttggctactttccttatttacttgttctaattatacaagtagtcagtattttgcacaaatagcaaaaaagtttggaaaaattatcttccaaactttttaatttatttagcgatcgccacaactcttttttcacggataacggtaatcttaatattacctggataatcaagttctttttcaacctgattacgaatatcacgtgccaaaataactgtccgatcatctgaaatttcgtcaggttcaaccatcacacgaacttcacgtcccgcttgaattgcataagcctgcttaacgccttggtagctcttagcaatcttttccaattcggtcaaacgtctaatataattttccaaactctcgcttcttgcaccaggacgagcactagaaatcgtatctgctgcaacaacaagttcagcaataaacgacaacttaggcacatcgccgtggtgtgcagcaatcgcatttactacaacatctggttcatgatatttacgagttagttcaaccccaatttctacatgggaaccttcaatatcatgatcgatggctttaccaatatcgtgtaataaccccgcgcgaactgctaatttttcatccaagcctaattctgcagccatcgtgcctgctagcttaccaacttcaattgaatgtgacaaaacattttgtccataagaagtacgatatttaagacgacctagcgtcttaactaattcaggattcatccggtgaattcccagctccatcaaagcactttcacctgcttcatagatgtcatcgttaacttcttttctggccttatcgaccatttcttcaattctagctgggtgaatgcggccatccttgattaagcgttccatcgctcttttggcaatttcacgtctaattggatcaaaaccactcaaggtaacaacctttggcgtatcatcaataattagatctattccagtcaaagcttcaaatgaacggatattgcgtccttcacgaccaataatccgtcccttcatctcttcatttggtagatcaacaacagatacagttgtttcggcaactgtatctgccgcgctactttgaatagcatccacaatgacctgattagcataatgatcagctttagcttttacttcttcgttactatttctgatcatctcggctcgttctttgactagttcatcagataattgactaagcacaatcttcttggcttcttcctcatccaacttagctacgtcataaagcttttgccgtctagtttctactaattcttcagcctcagttaattttgcctttaagctagcatactgctgctttaattggtcttccttttgcgtgagtccactttcacgttcatctaataaagaattcttatgatctaaggtatcttcacgttgttgtaaacgatttttctcccgagctaaattatctttcttggaatttaactcatcctcggtcttttgcctaaaatcacgaatttgttcttgagcttcaagaattttttcttttttagtattttctgcactttgcttaacagccgctgctgcttgcttttgtgcattaacttcagcttgtgctgcagcaacctgtgccttagcatcagctaaaatgtggtcagcatcattctgggcattttgagctttttgttcccaagaatgcttgcgaattgcataaccaaccactgaacccaccaagaatgaaacaatggcagttgcgacgggaatcataattgttaacatattattcatgattactatcgccttttttagaattattcacacaacttttatgataaagaacctatctgttcatgtcaattaaatcaaaaaaccttggaaaataaatccagggtttttgacataattatttagcttgttcagactttttatctgtagcagcttctttttctgtcttggcttcttcgcgcttctccttgatcttttctggatcttcacgatcagcaattgacttttcatcaatcccgtaagcttgacgcacttgcttttggatatcttgataaatatctggatgctcttctagatacttcttagcattctcacgtccctgaccaattcgatcactcttgtaagagtaccaagaacctgctttatcgataatgtccttatcagcagccatgtccagtaattcaccactttgtgaaattcccttaccgtacataatgtctacttctgccaccttaaatggtggagcaaccttgttcttaacaactttaattttaactctgttaccaagaacatctcctgattgcttaatctgttcagctcttcttacttccaatctaatagttgagtaaaacttaagagcacgaccacctggggtagtttcaggattaccaaacattaccccaactttttcacgaatctggttaataaagatggcaatagttttggttttagaaatattacctgataacttacgcaaagcttgactcattaatctcgcttgtaaaccaacatgggcatctcccatctcgccttcaatttctgctcgtggtactaaggcagcaacagagtcgactactacaatgtcaattgccccactggaaatcaaagtatcagcgatttgcaaaccttcttcaccagtattaggttgtgacaaaattagtgaatcaatatctacacctaaagcttcagcgtaagcaggatccattgcattttcggcatcaatatatgctgcagtaccaccacgcttttgcacctcagctacagcatgaagggctaccgtagtcttaccagatgattctgggccataaacttcaataatacgaccacgaggatatccacctacaccgatagcagcatctaaagctaatgaacctgttggcactgttgaaatttgcgtatcagctttttcgcccatccgcattacagcacccttaccgaaattcttttcgatttttttaagcgctgcatctaaagcagcctgtttttcgtctttggccattaatgtcctcctatttttcgtacctaataattatactttgaccgccgtccaatttgcaagagaaatgcaaacgaacgttcaaaggattttttaccctctattatttattacgctaaaaatcgccattatttttttacaaaataaaaaaagaagcaaatgcttctttttaatcattcttgacttaatactattttacattgagcccttgaatacgccccatgattggtggaagtaatcgtaacctgagtaaatagtaaagatcaacgcaaggtaaagtaagatagtaccaatgtggaagaagtcaccaatcaataagaaaatgattgataacatttggcaagtagtcttaattttaccaggcatctttgctgctaaaacttgtccttcattttctgctaagatcaaacgcaaaccagtaacagccaattcacgacaaacgatgatagctactacccatgctggagcaagtttcaattcaactaagaaaatgaaagcagtcatagttaacatcttatcagctaatggatcagcaaacttaccaaaattggttaccatattacgtgaacgcgcaatgtgaccgtcaaaccaatcagtagccgaagcaacagcaaaaacgatagcagcaataacacgactccaaacaacagttgagcctgctgcttgaacactagcattcccaccaaaaatgatgattaacataaatactggaatcaaaaagattctaaaaacagtaagtttattaggtaaattcattctaacactcctagattttaattgttgttattatttccaccatcattgccattgttagtgtctgctgatgattgagtagtagatgattgttgacgactgctttgacgagtagcactgctttgagtagttgtacggctttgggtagaactactattggttgtattgttattagtagagcccgtattattagaactactattattttgactagtagttcccttagccttaccaatcaacaaagtaattgtcctgtacgcattgtttgctgtatatgggattttcttacctgcaatagtgattgaagtaccattatcgttgcctaaagtaatcactactctctctgcattgcttggcaaagtcatagtgtgcttttgattagcaagtaaagttgattgccagctattagcattaccattgacttgtacacccgctgaaatattttggttttcaccagcacgcacaactaggcgacggtttttattcaagccagtaactcggtactcattgtcactaaccttagtaaccttaactttattgactactacttttttagctttcttagaagatgacgatgatgacttttgtgatgaaacagttacatcattattatcagcttggttcttttgaccacctgaagaaagacgagcatacaaaacgtacactacaagaattacgataattacaccaagtccgatcgcaattcgtggcaagtaattcttccacaaatttttcttattgtcggtggtttctcgtacttcttcactcttattatcaatcgagttttctacgtactcatctggcttagcttctggtacatcatcgtggtaatcacttaataactccttaccatccaagccaacaacttgtgcatattgacgaataaatgctctaacataaaaatcgcctggaagtttatcaaattcattcttctcaatcgcttcaagatatctgctctgaattttagtagctttttcaatatctgcaattgaaagtcccttagcctctctggcgctctttaatttatctccgatatctgccatatttacctcttcaaattttaatttatcatgttgagtataccataaaattctcattacaacgtcttagttataaaagccatccacctgtaacataaattgtctgtcctgttaaataactactacgtcgatctagcagtgttctaacccagtatgaaatatcactgccattggcccaacgaccaactgggatttcatcttttacctcttgaatcgtatcctcagaaaagaatgcattcattttggttttaaccgcaccaggcgcaattacattaaccgttaagttattggaagcaacttcacgcgcataagcctgagcgaacctggttataccacctttagttgcactatagacgctttctaatgcactacctgcaccaccatagactgagcctaaataaactatacgactaaaatctcgtttcatcagttgtggctctaacaatttagttaacttaattggcacagtaagattaatattaatcagatcagtgatatttgctaatttttcatcacctaaaaaaccatacttagtaattccttgagcaaaaactactgcattaactggcaacaagtttttaacaaaatctgttaactgtgcatcccctgtcgcaaaatccaactgtagcgacataaaatcctggtcaggatgcttagcaaacagctcttgaactaaattttcagctttttgagaattagaatgataatgcaagtataatgaccaaccggcatctgccaaatctcgacaaatatcttgaccaataccgccagttgcaccaaagacaattgctcgcttcaactttatcaaccccttacttgttttctaagtaagcagaacaaagttcactgtctttcataatcttttggcagtagtcataaaactgatcaaaattcatcgcctgcaatttagctatattttgtgttaaattttcatgatctaaattttcttcaattaattcaattgccaaataagacagatcattacttgtcctagcagtgcgtgctaaccattctttcttttgcaaaatgaagttttgtctaataaaacggtattccgctgaatttttcttaattggttccgtcaataccctctttatttctgcaattacttcttgagcttgaggacttacaccaaaaatagtagcaaaatcgccctgcctggtgtaattaacagaaatctgcagcgaatccattaacaactgcttttttctcatttcttcaaaccatggtcccattgcacttagttttgattctaacattatttctaacagaatttgagtcaaatcaaagcttaataatactttcttaaagtttttaaagcgaattcctaaaccaaaggaattagaattacctctggctggcaagacttgatcatgtaacatgcgaaaactaacttgtttttcagctgtgcttttacctttcccgtgcaaatatttttgctgcagctttcctacttgccgcaaaatcgtttgcacttgattatcagaaaaatcaccgcaagcaacaaattgcatcttttctggcacatacttagcctcataaacttgggtcaagtttttcactgtaacttgattaattgattctttcgtacctacaacttcgatccctagattagaatcaccaaacatatcatgcataatcgcattatttacgctccaagttgggtcatcctgatacatggccaattcttgttcaataatcggagcctcttgcgcgatattttccttagtaaaatacggctgccctaccaattcaaacaagagatcgatcattttaggcgtatgctcaattccactacaataaaacattgtttcattaaaagacgtgaatgcattaacgtcagcaccaatatcttcaaattgcgttgacaaatcaccatcttttttggcaaatagcttatgctctaagaaatgagccgaaccggcaaccttttgtggatcactactaccaaagtcaacaattataccgaaaaatcgttgataaaaatgtggctttaaaataatttcggctttaaagcctgactgatattcttttttgataatttttggtgtcatcattttaaaacataactttcattaaagaataaattttgtgcgaaagctactaactgcttaggtgtagctctcctaattgcattttcacgatcaaagtctaaatatcccgagaacaattcatcacgcaacatttgacccatctgccagttttgaccgtctagaccaatcttcatattacgcaaaattgcctttttagcctttttaaataaatcatcttctacttcgccctgaactagtttacccatttcggataaaataatttttcgagccgctgcaatcttactaggatcaagtcctgcactgactaaaaacaaagaattattggcaaagcagcttgcttcaacattataagctgctcccaattgctcccgaatttgcgtaaataatttagatgattgatcacctgccaaatattgcgataataatattcccattacttgaccgcgataatcaatactttgttctaaaccaaagcccattaacaattgagcttgcacatttccttgatcatcctctttttcaatcaactttcttttagctggaatagttagactagctgtttgaaatgatttagttaaaccagtttgttgaaacatagcctgagctaatttagaaaccagattattatccctggtcattcctaaaatttgcattggtacattagctaaattacgccaataatgcatcatagtcgtgctagtcgcagctttgatttcatctagtgagccaataaatgtctccgcataatcaggttgatcctgataccacaatttaaaaaactgctccaacgcataattagatggttgttcaatcagttcttgatattcttctgctaattgacgtttagcatattccaccaaaggttccgcaaaattaggttgattaactatttgtgcaatcacattaagaatttcttcatacgtataatgtggatccaaaatctcaatcggctcaacaaaattggcataataagtcaaaagtatttctttaccaaaaacttgtggcataatctccagctgtaaatcatataattctgccaatcttttttgttgtaaagcaagtgacggataacttaagctgctattcatctgtattcgcgctagcaaactagcataagctaaattatgtttagtcagcggcaaacgcaaaaaacagccaatagcggctgttgtaaactttttattttttctaattgcaatattagttgtgagcattgtttgaattaccttcattctttattggtggcactaaaacttgtcgtggcttagagccttcagatggaccaacaatccctttagcttccatttcatcaacaattctagcagcacgattataaccaattctaaacctacgctgcaacattgacacgctggccgtctgttgacgtcgtactaaatcaacagcttgctcatagaattcatctgctggctcatcatctttactatcagcatttgatgaattttcaccttttttaggaatcattgtctcatcataactaacctcttgttgcttcttaacccattcaattacgcgttcaacttcatcactagcaatataagcaccttgaacacgttcaggtttagatgccccaattggcatataaagcatatcaccacgaccaagtaatttttctgcacctgtttgatccaaaatagtccttgaatccactccacttgatacagcaaaggaaattctcgatggtacatttgctttaatcaaaccagtaataacatcaacacttggacgctgagttgccaaaatcatatgaattccggcagcacgtgccatttgtcctaaacgaacaatcgcgccttcaacatcgtgaccaccaaccatcatcaaatcactaagttcgtcaactacaactagaatataaggtaacggcttcatcactggtttagttttatcacgattgttttcagcaactttttgattatattcactcatgtttcgcacgccaccagccgcaaatagcttatatctgcgctccatttctttaacaactttgcgcagtgcatttgcggctagcttagcatcggtcaccacagggatcaataaatgcggcacaccattataaactgaaagttcgaccatcttggggtcaattaaaactaatttaacttcttcaggccgcgccttcattaaaatactggctaaaattgtattaatcgctacggacttaccagaaccagttgaaccagcaatcaataggtgtggcatcttagctaagttggcagaaataatgcttccagttacatctttacccaatggtacatccatcggatcgcttttggctttattatcttgatgttccatcacgtctttgaatgaaacaacagacgttgctcggttaggtacctcaattccgataaagggcttaccaggaattggtgcttcaattcgaatatctttagccgcaagcgccaaagccaaatcatccgctaagtttacaattcgacttaccttaacgccaacagctggctggacttcataacgcgtaatagttggtcctaaaatagcttttttaataatcaccttaacgccaaaactcttaaacgttgattgcaaaacttgggtatttttcttaattaaatcacggtcagtactctgatcagtcgatttaattggatcaagtaagcttaaaggtggcatcttataagctttattgactggcgcatcagtttttagttcaccatgatcgacatcggctaattcctgctttaacttttgatcatcttccgcaaaagaatgtgacttaggtagttcctttaccccgtcatcatgttgtggtgcaatttgaatttgcggttctggatcaggtgtggtctctggctcaacttctacgtcttcagccgtcggcgttacatcgtcatcagttggatcggcagggtcaaagtctgctacattaggaaaaatcggtttatcgtcatcaactaaatcttcgtcttgttcctcttttttctgacgccgcttttccaaaacgtcattatatttatctttgacctttaccccagcttctttattctttttgatgaataattgactaactgtctggaatttttcgataattgttctaaatttaacatcaaaaaacatcaaaattccaattggcagcaataaaatagcaaaaacacggacaccgatttgccctagtagtggataaaaaagttgataagctaatgaaccaattaatccaccaccaatgctctcagtgactccagcacgaccaaactccgcggccattgcatgccaaaaagaattcaggaaattactgttaactaattcatgttcaaaatacaagttacattgaattaacagaattcccaaaaaagcgattgctaaccccaagctacgcttaattgttaagtgaatcggttgattatagattaaatttactaggccaaaaagtcccagtaaacctgccgcaaacaaataagaatccccgaagaacattcgaatcaaatttgcgatttgcttacccaaaataccgaaacggacaaaagccagccccgctattaaaatcaagactaaaccacaaatactccaattaagattttgctttttgtttgcttttcgcttattgtagctctttttggcctttctttgtttcttttttgcaggcatgtactcacctgattaattatcgaattcagccttgaagttcaagttaaccggctgacccaaagttaattgggttgtttcatagatcaaggtctcaagttgctcaactaatggtcgagttagtaactgccaatctgaattactaatgtcagagccatcaccatggtaatcttttaattgcacgatttgatgaatcaagccgcttgcttcaaacatagctggtgcaggaattacatcatattgaatagcaacatcatagtaactaccattttcttctgaatgctcatcgtcaccgctaacatctaattttctaattcctggtctaacgtcactaattggtttggtatcttcatcaactaaatcataatgaaatgcctgtacgataatatctgtctgtttttcaaaatccattatttattctcccctagattacgttcatatctttcaggacgatcatagtcatcttttaacttgtcattttcataatgatgggttgtttccatattaggaaaaccttgctggcgtaaagcttctagcaaaaccattgctacagaattagacaagttataacaccgaatgttatcagacattgggatacgtaaattacggtcatagtattcacgcataaaagtttctggcaaaccagttgtttctttaccaaaaacaaagtaataattcttgttaggatcagtataatcgacttgtgcataattttttgatgagaatttagaaattaaatacatctcatcattaggccctaaagtcttcaaaaaggcattcaagtcatcatgtctgcgtacatcgaccttatcccaataatcaagacctgctcgcttcatttttttattatcgatttgaaaaccaagtggttcaatcaaatcaaggacagtgttagtccccgcacaagtacgagcaatattgccagtattagctggcatcaatggttcatacaaaactacatgattagtcattcaaaaaactccttatcaaaaaaagcgtagcttttaagccacgctttaaaactatctagtatttattcgctttcgtcatgatctgcatcccccgtggtcgaagaaacagcattctcttcaaagagtttagactctcttcgataataattgtacacgcgagacacaataatcttcaagatcgcataaattggaataccgaaaactacaccccataagccccagacggcactagcaccaatcaagagtaaaattgttgtaattgggtgcatttccattttattccccattacccatgggctaagaattcttgattcaattgtttgttcaatagcaaaaacaattaagaccttaattaacattgaacctgaagtcataattgaaattacaattacaggaatcattgctaatggtgtaccaaagtatgggattaagttcataaacccagctaaaattgccaaagccacgccatatggtaaaccaattagaatgtaacccaatgagaacatcacacctacccaaaaggcaacagtaatttgaccacggacatatgaagcaacagcatagttaatatcatataataatttgctaaaactaggttgccatttttcaggtgcaaacttggtaatatatggccgcagttgatgaccatcttttaacatgaagaataaaataaacggtgcagttaacaaagtcatagccaccattgtaataatgctgacggcagatgaaatattgccgatagttgcattgatggtactttgtccagacttaaataaggtcttctgcgtattatcaatcatgcctttgatactgcctttaaatgaatgtaaacgcggatcttgcaacgcattttgtgttgcattaaccgcatcattccaaatatgaggccagttctttatcaatgaattaatctgattctgtgcaattggaaccaagatattaataatccaaattaatgcgacaactactagtaagaataaaactataattgtcaccactcgcggaatcttaaattttctttcacaccaatcaacaaccggattcatgatatagtactgaattaccgctaataataatggcggtaaaattgcactaaagaagatccaggcaggattcaatacaaaagatactttattaaagacccaaataattaaaaagaatagcaggacgtttaataaaacaatactaaaacgattatctaagaaccattttttaaaaacagttccacccctatgttggttattttccatctattcatcctaatttttaaatgtgttcataaacaatatcatcatcaaccttaaaattaggtaatggttgatcaatatccggatcaaagtagatcgcattagcaagtggcgtcttagaaacgggacggttaaagaacaaggttgcgtgtcccaatgccttcatgttgctctctaccatcggaccaacatagtttgcaacataggtttgaccatcaacagtgattgtatcgccttttttaaaaacaaaaccactaactggcgtctcagtactgaatttttgaatgacagaaacgtcttccaaatccttattagcaccctcgccaaataaaattaccatgccatctttattatcgacggcctttttaccaatttttttaatatttgcaatccatttcataatataatctctccttaaaaataattttagcataagaaaagctgcttaaaaacttaagcagcccaaaatcggcgattattttttgctcaacaggaaatcgtgtttttaagcgtctaatccgctttcatgctatactttattttagacttatttttatttagagatggaggcccacacatatgaaggttttaatcggaggttacaccaaaaaaacttccaaagggatttatgaattacctattaccagtgcagcaaatgatgcccgtttaggcaaagctgagaatattattagcgttggtggtccaacttatttccgaaaagatggtaatttaatttttactgttaataacgctggcgataaaggtggaatcagcgtctttcaattaagtgatcaaggcgcaaacgaagttgaccactatttaactccaggctcttcgccagcttatgtaggaattaaccgcaccaaaaagttgatttacactgctaactatcatactgctgtcttgtccgttttccgctacaacgacagtggcaagctcgatctagttgatactgtaactcacaaagctgaaacgttgggtccgcgtcctgaacaagttgacggtcctcaccctcacttctttgatgaaaccccagctggtaacttggttagttgtgatctaggcaatgataccgttgatttttatagattagaaaatgatcaattaaaacacattgctcaatataagtgcgaaactggctttggtacacgtcatatcgtcttcagtaaagatggcaattacttctacgttgtcggtgaactttctagtcaaatcaatgtcgttaaatttaacgaagacacttgggactttgaaaatattgctacttataagacaattcccgctgattttactgaccataacggagctgctgccttatatattagtcaagatggcaaatatgtttacacttccaacaggggacataattcaattgctgtcttcaaagttaacgacgatcatactttgagcctggttcaacgtgtatccacttttggtgacttccctcgtgattttaattgggataaagatcagcgctacgtcgttgtcgctaatcaaaatacagataatgctactctttacacaagaaacgctggtactggtagcctaactcctattcaaaaagaaatttccgtaccagaaggcactcgcgttcttttcaccaaatagtaattagcattagtaccaaagtcatggcgcaatagaacgtcatggcttttttattcctacaacttaaagtaaaatagaaataaatgaaacaaaatataagtcatgtggtaataagtcaaatgaaaggcgatgatatttgttctttttgatcataaatttgagtatatgaaactaagccttggtaaaggttgatttttttaatgttaaacttttgtttacttttaaatttagaccaatttttgaaattaagacctcggtgtcctgtacagtttgtcatctttgagcaatttaaagataactcgtactaattttcttgcagttaatgtgcaagcacgtttatgcggcgagtagacagcttcatcatacttcttttggtaatattttttgaaaacaggatcatgtaatcttgctagattggcagcttcaatcaagtaatatcttagatatctgtttccagtcctggccattggagtatgttcgttgctgtgatctcccgattgatattgattccaggttaggccggcatacttagccagctgttcttctttatcaaagcgatcgatacttccgatctcagcgataataccagctgtataggttttgccaataccgggaattgattccagaattttgctttctggtaatgcatcaacgatacgatcaattgctttttctagatctttaatagattcattaaagctttgaatcatgttgtaatgaacagaaagcactgcatcaattgaatcagtcattactttgcctaagcgatatgaacctctaacagctttcttaattgctttagccaaggtatctggatcggaaaagcgtcctctgcttttaacctgtaagtaagaaattaagtcttcggtaggcatatccgcgatctcatccagagttttactatcggttacaatagacatcattgtagcaccgaaaagaggagtattaatcttatctttatcgacagtgattagtttattaacccgataatataaagcttcaatgaagtgctgtttggtacgagtcagttcttgaactaattcatatctggtacgcgttaaacgctctaaagcaagatagttgtcttgtctggcaatgcttactcgataatgtccaaagcttagatacaaagcaatgtaataagcatcgagaggatcagttttactttcttcaaagactttatgaaacctgctggtttctttggggttaattacatcagtctctacattgagcttttgtaaatcttcgtcattttggaaaaagtaagcaggatgaaaactgtaaatagatgtagcttccatgccaataatgatttgatcatagtgtttattttgagctagatctaaaatttgttttttcagttcactagcaccataaagatcattgacaaagctatcgttaattaagcgtttgttttgatcttctgaatcaagtgcaacgacctgtaaatctttagaactaacatcaataccgacaaataatttcattggaaatggcctcctttctttcaaatttctgatcatagattttgatcttcacatgttaacccctaattacagttcttaagttcaatctcgccagtataagtattcactggttgcttctttgaaagctgcacctaatcccaattgctcaaggactagcaaaaagaagcaatcaatacagcatgtgagttagagcataaaggaactgcctgggtggcagacttataaagcagacaaaactgcaggaggtgataacctagaccagttgaccaaagccaatgacaattagaggctaacatgtgaagatcaaaaagcaaatactaatttgattaattatcacaatatgactaattacaatttatataatacgagaaggtgacaaagtgaaaagaaaaataattcgaatattacttttcattcttggcgggatattagggttactacttctgtataaactctatttaaattaccgtcctgaattgaatttattacttcattttgatcaccataatgaagaagtactcgttaacatggtccgtagccatggtattgaagacttagcctttttatttttacttaatgcgatctgtgtagcaattcctggcttatccaacggaatcttttgtgttctcaacggaatcctttatggccctgcctggggatttattgttaattggatcagtgacattttaggccaaataattttaatggaacttttgcaaaaactctatgacatgaaaaagatgtctaacagtaaagtttataagttattgactggattaaaatcaccaatgcttggattaattattggatatatgattccatttattccgagtgcgacagttagctatgtcaacattatgattaataaggagcaacgtaaaaaacagctaataccaatcattatcggtgtcatccccttcgcttacttatatgcttatggtggcgattcaatcttgcacttagacggaacacgattgattaaagttgtaatctcattcgttgtcattgctttaattgcagtagctattttgcttagtctgagagcaatcaaaaagcgtacaaaaaaagcttgaatttactcaagcttttttattatgcctagcatatttaaactaagttagcttcttctaacagttcttcgacccaagttctcttgattttcttcatccctgttttgagagctaacttctcaggtaatggcatctcttgatcaactaatttcttcttgtcagacatgtagtacatcgcacgaagcaattgacgaatatcataaattgagtcaaatacttcaggtacaccacggtcaacgttaagcaatgtataaacagcttccatggcagttctgacagaatattcggtggtaaagacagtgtctctagttggtgattcggcaaaattgccaataaaggcaatattaactgatccttctggaacaacatctggacggtccccatcatgacgaggcataaagtaactagtgatatatggcatgtaaactggtacggtattcatattttcttcactagccaattcgctgatttgactctctggcacgcctaagtgatagagcatttcctcggcaatttctttaccagtacagtcaacgactctcttcttgatgtaattaccctcagtatcagaatacaaagcataaatccaaacaacgatttgatctggattctggctcttaaagtgaggttgacggtgaatagtaaagctaagttcccaattagagtcaacaacagtgataattccaccagtattaactttaccatcgtaaaggctgcgcttagtcaagcgttcaaagtatggagctattttcttattttccaaggtagctgtagctgatacgaaccaactacgctctggcaagttttcacagaagacatctggatgaccaaagtcaggatcttgtttagccaaattttcccataatttccatgaagagcccttgtcgtgagtaattggtgctggggtattttgatcaccataagtagaactttcagtgattgaaccgttagtcacaaagacaatatcatctggggttaaatcaatatcactttgctcaccattcttggtcatcacgatcttcttggcaaccttttgcttgccctcatgatcaacaaccacgttatcaacgtgacaatcatattcaaattgaacaccgtgatcttttaaatatgccaaaagtggcttaaccatggactcatattggttatacttgttaaacttcaatgcggtaaagtcaggcaaaccatcaatatggtgaataaagcgcattgcataacgccgcatttcggctgctgagtgccatttttcaaaggcaaacattgttgcccagtatgtccagaaattagtcttaaagaagtcatcactgaagaattcttcaattgtttcaccttggagttccttttccggtgtcatgattaacttcacgatttcattagtgcacttacctagaccatattgaccatcacttggtaagcgatcaccgcgattataaattagacggcaattggatgagttaggatcttctttatcaagccaataatattcatctaagtatgatgcgccagggatttccaaacttggaatcgatctgtacatatcccacaaacattcaaagtggttctccatttcgcggccgccccgaaccacgaaacctgcattaggacgcttagcaccatcaagtgaaccaccagctacgggtagctcttctaaaatatgaatattttcacccttcatttgtgcatcacgaactaaaaagacagctgcagaaagaccggctaaaccactaccaataatataagcagattttttatctacgcctgcgggctttttggcatccgcaaaagcctcataattaccattggaatagtacataaagatatcctcttttctgtataagtatagtttttaacattacactttaattataaagaaagcggttactagatgcgagttttttagaagttttagctaataactttagaattctttattaattagtttctgccacagttcttgcatatcttttggatcattcaactcaattgttttacatttttgctggctaaatggatccggaaaatttaaataaaagcaatttaaggcttggcgtgaaaacccatcttgaattccatataaaggatcaccatataaggggtgtcccagataagccatgtgaacacggatctgatgggttctaccggtaagcaagcgtaactctaccaagctagcacctgtaacctgatctaggactcgatacgcggtttgagcgtcctttccatctgccactactgcacgtttaactccactaccctttttgccaatcggttgatcaattaaaccagttaactcattcggagcaaaattgccatgtacaattgcatgatattttttgacaaatttctccttgccaattttactaaaacgagcatgggaaattgcatttttccccaccaatactaaaccagatgtatctcgatctaatctagtaataacatgcggcttcaaatttttctgtcctttttgggcaaaataacccaacaatcgattgaccaccgcatcatcatcttcatagcgtgagggaattgacaacacacctgcaggtttgttaactacaagataatttttattctccaacacaattgatactggattattcgatggctttaaaaaatcatttttcttttcttcaccactgataaaaatcacttcatccccagcacgcaaattaaagctagtatatcttcttttatgatttactaaaatcatgccatgatggtgtttagcattgtttaacgcttgatgcgaaaaaccattttttaacaaaaaaggacccagctttttggggtctctttcttgcacaattagtttaaataaactagtcatttttttcattatctccaataaacgcattttgtacgcgtgaccaaaaatgatggtggccaaattgatcaaactgaatcgaatgccgcgaaattcgatattcaatcttcttagcattacgtacatcaattcttgctccatcaactgtcatcacaaaatgatctgcattaggaacaatcgaaatccattgatcaggcgcaatcacaattggtgatgacaaagttctaaaaactcgattattaattgaggcaatttcagtcatttgcaacgcttttagccggggatgaattactgcaccacctagtgatttgccataagcagtcgaacctgttggtgttgaaacgcaaagaccatcgcctcgaaagttttcaaataattgatcattaatgtacacatcggcctctaatgtatgtgaaactcttttaactgctgattcattgacggctaaatggtaatgagtttcacctgattcagtgagcatctttatttctagtaaaggatacttcgctggttcacccttggttactgctaaagcatcaaccattttttcaatatcatagttacgccaatcagtataaaaacctaagtggccagtatgaatcccaataaagcgcacagaatctacttgattttcatagcggtggaaggcattgatgagggtgccatcaccgccaacagtgatcactacatcaggatatctagcatcaaagataaagcccttttcctgaagcagcttcttaagctgcgcaactgtctttaacgtttcatcgtagttattatgcgctattgttactttcataatttttctttgcccttatttttggtaaaaattttctgagcttcttggacctcatccttaattgacgacatttcttcgtctagtctataagcggcttcagccgttgattttaatctagctgaaatgtcatcaggatagacaccttgatatttgtaatttaaagtatgttcgacagtagcccaaaagttcattgccatagttctaatctgaacttccgcaattaattttttcggaccttctggtaagtaaaccgtatagttaatcaccatgtggtatgaccgatatccactcggcttagcattttgaatataatcacgctcctcaacaacttccatatcatctcgagcatgaatcaaatctactaccttataaatatcgtctacaaattgagtaacaatcctaatccctgcaatatcttgcatatcagtctcaatgacatcaggactaattactcgccgtttcattttttcctttatagaatcaactgtctttacccggccaattacaaattcaataggtgaatgttctcccttagttaaaaagccttgtctaagggaacgaaatttaacctttaactcgcgaacagcttcgttataaggccacaagaagttatcccaatctaattccatgagaaaacattcctttcttaagcaaacaaactcattttaccatataattaagttaaacagttcggaggaaaaacagatgagtaaaaatcgagaaattgaagcaaaaattcttttaaataaaagcgtttatgatcagatcactgccgcttttccaatcaaaagtgactttacccaagaaaattattattttgatacagcagatgatttattaaaaaatcatcaaattagcttgcgtattcgaatctatgctactcacgcagagcaaacaatgaaggtaccggatcctaatcctgtacaaaagaatttccatgaagtaattgaaattaatgataaattaactcacgctcaagctaaaaaattagtagcaaaaaagcattttaaattcactggtaatattggcgcatatctagataatcattttgccaatgaccaaaaaaagctacatcttttcacctggagcaaaacccgcagaattttgatgaacgggccacaaaactgtgaattaactctagatgctacgtcttatccagataactatcaagattttgaattagaaatcgaaaatactaatcctgctttaattcaaacagtattaactaaacttgaacaagaatatgactttgaacaaacggctgctaacactaatcaaagcaaaatagctcgtgcaagcgctcaccaaaaatagtatatagaaaataaggcatattttttgtcacttattttttttcttgctaaagtaactaatagtaaatcaccaaagaggtcgagattatgtttgagatttttctattcatcaatccaatagggatttattgttatgacactgaaaaacagattcgtaaaaccgttgatgaattaggggtcgacgtttgttatcactatattcccattgcaaatgtttgtttaatcaatgatgatgcgattcgccgacgcaaagatgaccagaagttgcctgatattagtaatttttctagagcaacttatgaagcattagaaaattaccacgcgattaggctggcctatggcaacaaaaaagcccgtcaatacctgtatgaattacaaaaaaacttgagcaaagatgcttcagcttatacacctgagctgcttaagcggatcgcaaacaaattacatatcaaggatgcggatattcaggcaatcaaacaaactgattacctgcgtacttctattgaagaagatcaaaaactagccaaccaatggaatattaaagctactcctaccaccgttatctttaacgaagacaacgagcaaaatggagtattgctagagggaccaatcaatcaacaggatttagttaatctaatgcttccagattgtcaaaagtgtttttcagactatttacctgcggagcatcatttacgccttatctaaaggcgttttatttttgcaaaaaatcactcacccgatctctttcacctgggttacgccaagtagcaaaaactttatcaggtaaatcatcaagagttaatttgcgttcataaagcatctctcctattttcaatcctaactttgttttttgcataatttgctggcgtaaatattttctttgagttgcaatgttcaaagaatattctttttttgaatggcttaaagcgccaaaaatcttttatccccaattcatcaaggacaaatgatttactttgataaaccaatttattagctaccggttcttctaaaacattatattttaagcaaaaacgatttctctgtggattaatttctaaatagtaattcccccaagctttattttgtcgaaagaaaatcaactgtgtgcgtttcaatcgccgtttcaaatagtgtcgctgtcccacaatccaaatatcttttacaccaattttttgataaagctgatgccgatggttaaattcttgttgactcaacggcgcacattgaacttcaaacgctaacttagcagttgctaagacatctgcacgcaattgtccttcagctaatggaatctcaacttctgccggaaaaccagctgccgtcaaagctgacttcaacagcattttcgattggtgatgctcctctttttcacccattaaattactgtacttcacaagatgcttaaaaaaggctgctttttgctccgacataaccaaaatcacttttttattgcaatgtggacagtgataattatcacgattcaatttcttttgccttgcattaactaaacatgcttcgtcaactgcaaggactaatttcttatttaacatggctgcatacatttttctcacccatgttttattacgtaaaaaagagacggaattttgtcccgtctctttttctttaaagaatcttaataattagctgcttttaaaaagtaatgtcgaatctggcctaaagcattttgcatcaataagcatttgcctgtttcttcaactacacgcatcttatcactatcgaccttaaaaccaaattcgttggctattgtccacgcatctgctggtttaagctcctcatattcttcatcaagaaatgccaaatttaagaaatattgtccatgcaagtaatacaagctagaagctaaatcatttgccttaaggttatcagctaattcaattagactacctaaatcatcaaaatagtaagcctgagtcttgcgcgatctccaatcagttggctcattgtttttatcatcttggttaaaaaagttgtgagtagctggtccttgaggagccgaatttgaattcgtactctcctcatctaaatcaaagaaactttttgaatcatccgaattcgttgatgattgctcatccttaggaaagctatcacccattagtttccttaaattctgtgcatcgtccggcttaactttggtgatcatcaaatctaatcccccattattaggcattacttgaaatgatactggatcaccattggcaaattcatggtcttcatcgacctcatcaagaattttatagaagaagtcttgaatcttttgtctattacctaataaatcaagcattcccatcccacgacgagccaattcagctttatcaattcgaactctgatagtattcttatcaatatgatctacctgcacaggatctcacctccatgaattaatatatctattgtagcgtatttttcgtttaaaataaaagtgttagtctcaacaaaagccttaactaacacttttcaatcattttataaatctgcaatcttttgtgcttcagccaattccaaccgacgaacttttcgtggcaagaatcgacgaatttcatcttcattgtaaccaacttgaagtcgacgatcatccataatgattggtcttcttaacaaactaggattcttttctactaaatcaagtaactgatcaattgataaatcgtctaaattgattcgcaattgttgaaaagctcttgagcgggtagaaatgatttcctcagtaccattttcagtcatccgcaagatctttaataattcttttttagtcaatggttcagaaaaaatgtttctttccttgaatggaatattatgtttttcaagccacgctcttgccttgcgacatgaagtacaactaggagagacatataaatctaccataaaaatcacgctcctcagaacaaatatttgtatacgtttctttactcatagctagtataccatataagcttctttttcgtaagtgcttaatttatcgtttacctctgctatttacttaatactaaagataaaacgtgaattatttgtgaagatttcgttcgttttgtttaaaattattaaaaataaaaaaagagacatcacagtctctttttgcaaattaaaactacttgttcaattttttcattaaattattaactaatttttcgttgtcttcagcagtttctgatacataacaagcttcgttagctaattccttaatgtcagcagtgttcaatttcttcattaagcttctgatacgcaaaattgaagttgcactcattgagtattcatcaagtcccattgaaagtaagattgggaacatagtgttatcaccagcagcttcaccacacataccacaccaaataccgttttcatgagcaccatcaatagtgtgcttaatcaaacgaagtactgatgggttatatggttggtacaagtatgacacattatcattaccacggtcagcagccatagtatattgaattaagtcattagtaccaattgagaagaagtcaacttcctttgcaaattgatcagctaaaacggctgcagcaggtacttcaatcatcataccgacttgcaagtcatcaccaatcttaacgccttctttagcgagcttatctttttcttcagctaaaatttgcttagcttcacgtaattctgctaaagtaccgatcattgggaacataattcctaatggaccgtatgcagatgcacgaagtaaagctcttaattgagttctaaagatatccttgtattgcatagaaagacggatagcacgaacacctaagaatgggttcatttcttctggaagatcccagtaatcaaggtgcttgtcaccaccgatatcacaggttctgataatggtttgtttaccattcataccttcaataacttccttgtaggcatcaaattgagcttcttcagttggaaagtcactagagtccatgtacaagaactctgttctgtacaaaccaatggcttccgcaccattatcctttacacctggcatatcattaggtgtaccaatgttagcagcaatgataaatttcttgccatctgcagtaactgatggttcattcttaagcttagcccattctgccttttgcttaaggaatgcttcactcttttgcttgtaatcagctacttgagcgtcacttggatcaataattgcatccccgtcaagaccatcagcaattaacatatcgccgttcttaacatccttagtaattgagtcagtaccaacaacagctggcaattcaagtgaacgagccataatagctgagtgagctgtacgaccaccaatatcagtaacaaaacccttaacatactttttgttaagttgagcagtgtcacttggagttaagtcgtgagctacaacaattacttcatgatcgattgaagcaggatttggtaattccttaccaagaaggtgagccataatacgctttgaaacatcacgtacgtcagcagcacgttcttgcatgtaaggattatctgtcatcccttcaaaaatagcaataaacttcttagcagtctcatcaagagcagcttctgcgttgatctttgaatccttaatttcattctcaatggcaccagtaaattctgggtcatttaaaatcattaagtgtgcttcaaaaacttgagcttcttcatcgcccaagctttctttagcaatatcatgaatcttttcaacttcagcagttgaagtcttaattgcatcgttgtaacgagctacttcagcttcaacatcagcaattgaagatttagagaatgaaagatcaggctccacaagaagatatgctggagcaatagcgataccatcacttgcagcaattccttttaaagtcttggtcattattcagctaaaccttcttttttcatagtgtcggcaattgcgtccaatgcgtccttttcgtcatcaccttcagcagtgatagtaacatcagcattttgaccaacaccaagtgacataacacccatgattgacttcaagtttactgacttaccgttgtattccaagttaacatctgagccaaactttgaagcagcttgtactaaaagagtagctggacgtgcatgaatacctgtttctgcaatgatatgaaaatcgcgtttttccattataaatatctcctttaaattgaaaaattaaactggtaataaatacccattcgagtattagattatcatgtttttacagattagacaactgcaatgtaacagtttacattatttattcatcggtattcgtagcggtatacacaatcgcgccgcctctttctgccctaccggtaatatattgtctttttccataatttctaatagtcttttgaagatcaaacgcatcttttggctcaactttatactcttttatctcacctgagactaattgatctagaattttctgataatccaaaaatatcaccacttttttaaaattttataatttttccactattaattctactatttatattcaattttcaaaaatattaatattttgtttgcggtaacaaaagcatttcttacaaaaaataagtgtttgagtcttagcacttgactaccaagagtgctaataatataattttggtacagttgaaaagaaaggcggtactatattttgctttgccaaaattgtcatgagcggcccgcttctattcaccttttcactaaggttaatggccaaagccgcgaaatagatttatgtcaacactgttatcaagaattaaaaaatcaacaaggaaatcaaggaaaaatgaataataatgaattttttggcgactttgatgatttattcaacgcattaaacggaaataacaacaatgccgcaaacaataataatgaaatgagaaataacgaccctagaatgcaaatggggggaggcgctggtaatggtggtcaaaacggcagaagcctacttgaccaatacggaacagacttaactgcccttgctaaaaaaggcaaaattgacccagtaatcggtcgtgataaagagattgctcgggttatcgaaattttaaatagaagaactaagaacaaccctgttttaatcggtgaagcaggtgttggtaagactgccgttgtcgaaggcttagctcaagaaatcgtagatggatcagtaccagcaaaattgcagaacaaacgaattatttcattaaatgttgtttcacttgttcaaggtaccggtattcgtggtcaatttgaacaaagaatggaacaattaattaaagaattacaacaaaacgacgatatcattctttttattgatgaaattcacgaaatcgttggtgccggtaatgctgaaggtggcatggatgccggtaacattattaagccagctttggctcgtggcgaattgcaattagttggtgctactaccatcaaagaataccgcgatattgaaaaagactctgctttagctagacgttttcaaccagttgaagttaaagaaccttcaattgacgaaacaattcgcatcttaaaaggtattcaaaaacgctacgaagactatcaccatgttcactacactgatgaagccattgaagctgccgcaaaactttcagcacgttatattcaagatagatttttaccagacaaggctattgaccttcttgatgaagcaggttctagaatgaacttaaccattccttatattgataaggataaaatgcaagaaagaattaatgccgcagagcaattgaaggaagaagccttaaaaaacgaagattacgaaaaagcagcctactaccgtgatcaaattgaaaaatatgaaaaggttaaagatcaaaaggtagatcctgacaagtcccctgttattactgataagatcatggacaagatcgtagaagaaaaaacagggattcctgttggtgatattcaaaagcaagaagaaaaccaactgcaaaatctagctgctgatttaaaggctcacgttatcggccaagacaaggctgttgaaaaagtagctcgtgccattcgtcgtaaccgaatcggtttcaacaagtcaggccgtccaattggttcattcctcttcgttggtccaactggtgtcggtaaaactgagttagctaagcaactggctaagcaaatgtttggctcagaagatgcaatgattcgtttcgatatgtctgaatacatggaacaatactcagtttccaaattaattggttctgctccaggttacgtaggctacgaagaagctggtcaattaactgaacaagttagacacaacccatatagtttgatcttgcttgatgaaattgaaaaagctcacccagatgttttgaacctcttcttgcaaattcttgacgatggtcgtttaactgactcacaaggtagaacagtttcattcaaggataccatcattattatgacttctaatgcaggacaaggcattaagaacgctagcgttggctttacagcagaaaacgaagatgaagctaatgaatctgctagaaataatatgagccaattctttaagccagaattcttgaaccgtcttgatgatgtaatcgaatttaatgaattgactaagccagacttgcttaagattgttgacttaatgttgcaaaataccaacaatatggttaaggatcaaggcctacacattgatgtaactgctgctgcaaaagataaattagttgaagatggctttaatcctgccttaggtgctcgtcctcttcgtcgtaccatccaagaagagattgaggataatgtggctgatttcaaacttgatcatgcacaggctaagaatttaaaagccgatgttgttgatggtaaaattgtaatcagtgatgaagcaaataatgaataggatttaataaaagacaaagtccaagttataccaaaagatttcgaagcaatattagaaatcttttttcttaaaaataaaaatatgctactcaatttgaggtatactaaattagaagaagtaaagctaacagaaacaggtgaattccatgcatttaattgatgtaaccaataattactctgatttggttcacagtcagctcaacactaccgatgcaaactatgttaaagtttattctcttggtaatacttcagttatttatactgaaagtaaggattctatcggtattgtacttgaaaaccatgaccgtcgtgttcgcgaagatgagattgaattcgtaatcaagcgtttaattaaagattatgattcttcatacactttgactgtagacaagagtcgtcatgtaatcgaaattcacgttgacaagtaatccaaatattgttgtatcaaaaaaggaggattgattcattcaattctcctttttctttttgctttaaagtttttctgttaattcaacatctggatatttgtcatggaagaaacgttccgcaaattcattttcaaataagaataatggattaccataacggtccttaactaataagttacgagtattagacatgcgtgggtcaagctgttccggatcaatccagcgcgcaacacgatgaccaatactgttcatttcaacttcagaattatattcattcttcattctgaattggaacacttcaaactgcaattgaccaacagcaccaagaatatactcatccgtttgataattgcggtaaagctgaattgcaccttcttggactagctggttcatacccttatggaatgatttttgcttcatcacgttcttagcagttactcgcataaataattcaggtgtaaattctggtaatggtggataaacaatcttgcgcttaccagcataaatactgtcaccaatttgaaaattaccagtatcgtataagccaactatatcgccagctaccgcatcagaaacttgtactcgctcgcttgacatgaattcagtcgcattatttaaacgaattggcttatcagttctagctaaagttacatccaagcctttcttgaattcaccagaaccgactctaacaaaggcgattcggtcacggtgatgaggattcatattagcctgaatcttgaagacaaagcctgaaaattctggatcttctggacttagctcctcatccccattaactgtgtgactctctggtgctggagccaaatcaacaaagctgttcaagaatgtctcaaccccaaaattggtcaaagctgagccaaagaagacaggagtttgatcacccatagcaatcttctcgcggtcaaacttgttcccagcttctttaatcaaatcaatttcatccagagtatcctggaattgaggatcttgactaagtggctcactatcaggcaacttaccatcttgatctaatggtaaaaagcgatcttgatcatttttgcggtaaagctcaacacgattattagcgatgtcatatagaccctttaaagtttgacctgaaccaattggccagtccattgctacaccctcgataccaagcaaatcttccaattccgcaattaaatctaatggtggacgtccatcacgatcaagcttgttcataaacgtgaaaattggaataccacgttgcttaacaaccttaaacaacttctttgtctgtggctcgatacctttagcagagtcaattaccatgacagctgagtcaacggccattaatgtacggtaagtatcttctgagaagtcctggtgtcctggcgtatccaaaatattgatacgcttgcctcgatattcaaactgcataaccgaactagtaacagaaatcccacgcttcttttcgatttccatccagtcactagtagcaaaattgccagttttacgtgccttaaccgtacctgctttacgaattaccccaccaaacaaaagcatttgttcagtaatcgttgtcttacctgcatcggggtgagaaataattgcaaatgttcttctcttttttactttatctgctaactctttgtccattagtcctcgctatcttcttccttttttgattcatcaatcgttaataataccgtcaacaagcgtgaccccttcatccttctagtggtcaaagtcatcccatcaccaatatcaactgttaacttttctcccttagctggaatcacttttaaagtattgatcacatagcctgctatcgtatcaacatcttccatttgaagattagtaccaaattgctcattaaaatcatctaatggcatcttaccgtaaataatgtacttatttggagctatttgattaaaaagaatctcagtgtgatcaacctcatcatcaatatcgcccacaatctcttcaaccaaatcttcaattgtagctaatccagttacaccgccatattcatctgtcaaaattgctaattgtcgttgcgtttgctgcatttccatcaacaaatcgcccagctcggcagtttctggtgcaaacagcggctcagtcatgacatctttatagtcaagattatcaaaacccttttgtttagcctttcgtaaaaccgttctgatatgaataatccctacaatcttatccttatcacgttgataaacgggaattctagaatatggctcacgaaggatttcatctagattgtcttgaaaactgacttctcgatcaaccatgaaagcatctgttctaggtaccattacttcacgggctgtcttaccctgaaagtccaaaataccttctagcattgaaaattctgtatcatcaattttatgactttcatgtaaagtaacaatttctttttctaaatgatctttagtccccacttttttatcgccggataatctattttttaagcgaccaaacagagttcccgctccaggatcactattcattttcgtactctctttcttaaaaaagttatctaaatatagctattatagcatagagccaataacaattatgttaaaatagcacataagactaggaggttcgtcatgaaaaaaagtcatgtcttactcgtttttacatttcttttgctaattccctatatctgtagcttagctattattggaatcggctataatgcattagttttacattcagctgaactttatcgcacattaatcggctcattagttggcgcaatcattatgtttgctgtcaaggctactattcaacggcctgttgatttattagctgttcaaaccaacgatggcttactgaagcagcttttacgtttcttcagtatcagacgacgctactggcttttagcagctaatattatcttagactttgttctttgctttgctgctacctacataatacgtgctcttttaacacttgatcaaatcgtaggcagctccatcggctttgttttgttaatcatgtttgtttcaacttgtcttggcgcttatgttgaatacgataacctgtcaatcgaccctgagcagcattaattacttgctggccttcaagtacattacttgagccagtttttttgtatccatgtcaagatcccaagtaatatatggcgtgtcactgtcacccaaattttcatgtacttcaattccgctagcaactacttttttggcaaaatttggcacggtactagtcaacggtaagttgaaaaagactaaagtttgattctcttctacttcctccgctacctctgcagctggtaattcaaacttcattaaacccgttggcacttcatcttttgctacatctgctaaaacgccataccaatacataaagctgtcctcacctgataccactaggacagaacgcttattttctaaattatgatcagctaaaaatttttgaaaagtttcatcattttccatttgctgattagcttccataaagctcttttgagcattcatcaaaccagctggaaatggacaaccaataaataatcttgattcaatatttttcttcattttttctcctaatattctactaattcgtctaaatcaattatttcaccgtttaaaaaggcatcaatctcacctgatgaaaaaccgtgactaaacaaatatttttttattttaaaattgcgttcaatttctggaagatttctaaaacgcttgtaagccttaattccttgtttcttcaaagcttctgtttgtgcattctcatcttctttaagatccattgcatcaataataacgttactaatcccgctatcaaagccatgcgttaataatttagtacgcatcttacgctctaattcacgctgtgaaatcttgccaacttgatggctcatcgacttaatcacgcgttggcccacttctagccaatcttcttcatcaatttcatctaacttatcctgactaatttcaggatcaacgcctttttgcgtcaactttcgtaataaacttttagggccatcagagccaacacgcaaatcatttttgataaacagcttggcatattgacgatcatcaagatagcctaattcattcaattgactaacagcactattggctgcttcatcagagatttcgtgtttttttaaatattgcagcacctcaaagatggtccgaggctcgtaactcaaaaaatgagccgctaaatcactagccttagcatcagcatcaaattgcctaatcttttcaacctgctcatcatttaattctttacctttaagcagcacaaattctgccaacgttttctctccggcagaaaaagcatattttccatcaataaaaatattatagcgacctggccgtttttgtgcacttactttggttatgatcaacttgtttcacctcgcatatttttctacatccatgctagcaaattttgctaaagcttgctaagaactttttccaggtagtacaattaattgaacacaatttagtttttagtagaaagaattaacgatgaacagaaaatttacccataataaaccaaaacatgaaaaagacgtcatcatcactattaagcgtttaggaattaatggtgaaggaattggttactacaagaaaaagattatcttcattcctggtgccttgccagacgaagtagtagttgccaagattgttaaatcatatccacactacatccaaggcgaactggttagaattaaagaaaaaagtccagatcgcgtagacttccctgaaggtgttgatcccgagattggtggcttagaattagcgcacttgtcttacgacaaacaacttgaattcaagaagaacaatatgcttgaatcattacgcaagtaccatcctcgtaattacaataagtataaagttaaaaatactatcgctgctcctgacccatggcattatcgcaacaaggctcaatatcaaattgaaaaagatcatggtcaacttaagcttggactttttgctccaaattcccaccgcttgattgacttaccaaagatgccaactcaaagtgaagacacacaaaaaacggaacgtaaaatcaaggttttaattgaaaaattgcatgttcctgttgccaactatcgtcgtcatttacctggcattaagaccgtagttgtccgtcaatcagaagcaactaaggaaatccaggtaaccttgattacgatcggccacaagattaagaacttaattcctcttgctaaagaaattatgaaacttgatcatgtagtttctgtctatcagaatgaaaccgaatggcagaatccacaagtttggggaaataaaaccgaaaagcttttgggcaagaatcaaatcaccgaagaaatcttaggtaaaaaattcgccttatcaccacgtgccttcttccaattgaacccagttcaaaccatcaatctttactcagaagcattgaaatacttagacctaacccccgatcaaaccttgattgatgcctatagtggtgttggtaccttaggtattttggcagctgaccgcgttaagcaagttgttggaatcgaaaccattccagaggcagtcaaagacgcacaacataatgtcgagcttaaccacatcaaaaacgctgattatattcaaggcagtgttgaaaaggttttgccagaattacaaaatagtggtgttgcaatcaatgctttaatcgtagacccaccaagaacgggcttagctaaaagcttgatcaaaaccctcttgcgggttaaacctgaaacttttgtctacatctcatgtaatccctcaaccttagctcaagacttagttttacttagcgaggcatatgatgttcgggtcatccaaaatgtagacatgttaccacaaaccccacgctgtgaggcaattgctaagttagtgctcagaaaagatagataaatccaacaacctagtcttgggctaggttgtttttgtatataaaaaagcggctactggacaatcctgtcccttagtagccgcaatttcaagtggatgaggtagctcatcaattgatagtcacgatttttagttgtttggtatgtatttaaacaatggcattatcgcaaccaatattaacattcacttgttcgggtctttacataaaatgtaacttttaataaattggagtttttgcgaacagccaatgataattaatcaaataatttttaattaagctatttatggctgacacctctacgtatagagaatctttcaagtttccaataataatacaattctggagataaaaacttacttatatttttttatagttgttaacttttatttctacctcttccacactattcattatatctagttgtgaaaccgtttacaagaactaacccacatatttttgcaaaaatctttctacttgttgtcgatattgctttggatacattggataagacaaagcatgccctgcaagtggcgcaagccaaatttgctttggagcagctgttgccgcataattttgccagaccatcttagttggcacaaagtgatccttgccgccatgaataaataaaaatggtcgcgtatttttatttaactgagcaaccgcagaagcatcttttaaataaaagccatttttcactctattaattccactaaccaaatcaactattggaaaccgtggaaaagccttcatatgaaataaattttgagcttgatagttaatttcacctttcacggttgaataaccacaatcttcaataaaagctttcacttgtggtggcaaaagcataccgcttaccatcattgccgttgcaccacccatgctttgacccataattacaatttgggcatttgtaccagtttgatcaattacttgatagatccaacgcaaaatatcatctttttcagcccagccatagccgatatacttaccttcgctgcgcccttgggcacgtgcgtctggaacgagaacattataaccaaaatcataaaacattttggcaaaaccagccatactatctccatcactcataaagccatgtaataaaattgcggtttttttggcatgttgatcaaggtactgggcgaacaaagttatgccgctatcagttttttaagtccatgttttcttagaaaaatctctaaaccaaaccttatcacgataaagtggatccttgcctgataattctttggagtcagcttttttattaaacggtgtcatcgccatcttgaaaaagtactcgcttgccgcaaacaagccagctccagcaattaatgcggaagacaataatagtttctttttcatcttttaacacttccaaattcaattatttcacttttcattttataattaaattgctgaaaatttacaatccttatgacttaattatactgaaaaatgcgcttaacagacttacttcaattaatcgatgacctgaacctgaatactaaattttatctaaagcatgatgacaaactacttaagtggggaaaactcactattgccgaaggaaaatgtctgctgctacccgggcaaacagcaatgaccaaacaaaaattgattaaattagttggccgcatgcatggtcgcggcatccccttgttaacggtcattgaccaaaaagaatattccattttcggcctacagattcgcgaagatactggacaagcaattttaatgtaaaaaaagagcacaaatgtgctctttttcttattcttttacgcggtattgacgaatatgatccttagtaccagcaaaataccaagtacctacttcatcgtcgctagttaattctaagccatcctcaggatctaacaaagccgtattgaagacgtcttcatattgcttaactgtcagcttcttccgccgatcaagcattgcttgatcagctgtaggatcaacttgtttttcatatccttcaaccaacttgccactataaaactcagccattgcacctgaaccatatgaaaacaggccaattaatgagccagcaggtaattcaccattctctagcaaactaagtaaactcatataaagtgaagcggtgtagatattacctactcggcttgataattgtttagcagccgcaaaactacgctccaacttgatcattgttgcttgatcttgcccctcaatcgcaatattattagcttttaagcccatcttagtaaaaggtaaatgataagtaattgcatcaaaatcactagtctttaatcctttttgcttcttataatcagtaaaggtcttcttgaagaaatccaagtaaacttgagtcgaatacttgccgtcaactaaagcggtgcgagaataatttggtctccagaagtcgttaatatcttcgctgtaagctgaatgaccattatttagggctaaaatgcttgggtcagctttgatgagcattgccacgctaccggctccttgtgttacctcaccagcagtattaacaccatagcgagcaatatcactaccgatgacaattgcggtttgttcaggatgtacccgaacaaaatcacgtgccatcattaaggatgccgttaaaccaaagcaagcttcctttacttcaaaagttcttacttctggcttcaactttaaggctgtttttacaaataaagaagctgactttgattgatcaatactactttcagtcccaaaaattaatagaccaactttgttcttatcaatcttgtcaataaactttaaagtcgcattaattcccattgaaactgcatcttgcgtaatatccgcaacactcatctctctttgaccaatgccaactaaaaacttatttggatcttgctttcttgcgttcgccaaatcgaccatatcaacgtacttgtctggcgtaaaaagtccaatttgatcaatacctacttgcattatttttcctttcttatttttgctaaaagctccttagcatgactttcagaataatttttttcactaatcatcgcagctagtagctgcttgcgctcatgttcgtcatcggttaattcagtgactacgtttctagcctgcaatttcatatgccctgcttgaatgccgacagtagaaattgccagtaaagcggctaaattgtttgctagagcaacactaacaatgatctcggctaatgttttactcgtgattttttgccccaaaatagcaaagctttgccggacatcatgccgagctttaattgaaccgccaactactccaatcgccattggcaaagtcaattcgccaactaaataactaccctgcatcgtccactttgataaactgcgatattggccatcatgattggctaaaactgcagtggctgcttcaattgcccgataatcattgcctgtcgcaatcaatacggcgtcggcaccattcatgattcccttattgttagttaccgcacgataaggatcgtcaattccaatttttcctaatagagcaacacgttgtgcaacttgcatcccaccaatcgtttgtggatcaatcttcactttagccgtggccaattggctaggataatttgataaaatcgcaaataatttttcatcaacaccagcataattttctaatttagccgctaaaaattccaaaatcgagttggttttattcgcgcccatcgcctcagctggatcaaccaatacttttaagtaaagcaaatcctctttctgcacagcagttatttttctagtaccaccactatgacggactaagctggaaaacttttgattagctaattcgactaagtgcggaaattctttttctaattcaattaatgaaaaagaattgttgaccttcaaaacgatttgaccataaatcccttgtcggtcgctgctagctgtcacaccaccatttctagcaaagatactagctccatgattggcggcagcaactactgaaggttcttcaacagccattggcacccagtatttttgtccattgactattaagttttgtactacacctaaaggcaaacgcagctgccctacaacattttcactcaattcatctagacgtctcaaaaccgtatcatcgatttgccctaatgcaataccttcgtcctgtaataacttacgtctagcttcaggctctaattgataaaatttcattctgcattctcgatttcataagcaatcgcctgaccgccaccgatacacaaagtaaccagggcacgtctgccttttctcttctttaatccactaattgcactagcaactaagcgtgtacccgttgcacctaaaggatgacctaacgcgattgcgccacccataatattcaatttatcagttggaatttgtaagtcgcgagctaccgctacactttgggctgcaaaggcttcatttaattcgataatatcatagtcatcaaaattatgtcccgtcttcttaagcagttttttaaccgcataatatggagtataacccatcagtgcaggatcaaagccagcttccgcaaattcacctaacttggcaattggcgttaagcctaaccctttcattttctccttagttgccagaactaacatacttgcaccatcagtcaaaggagacgagtttccggcagtcacttcaccatccgccttaaaaacaggctttaagttactcaatgcctcaagcgttgtatccggacgaattggttcatcatgatctaaactttgaccatcaatctccacatccaggatctcattatcaaaaaatccggatttaactgctgcagctgcctttttatgcgactgcaatgcaaattcatccatatcctgacgactaacatgatatttttctgctacgttttcggcagtaattcccatatgcttgccagaaaaagcatccatcaaaccatcgttaagcatagtacttactaggtgatctgctggatcatttttgttttcttttttaacaaaataaggcgcattagtcatgctctcactaccgccgacagctactagatccaaatcgcctagttccatctgtccttgagctagacgtaaagctttcagacttgagccgcagacttcattaattgtaacggctgcagaagcttcactcatccctgaatgtaaggcaacttggcgagccatattctcacctaagccggtatccaaaacattccccataaacagtgcttgaacatcagctggcttaatattgcccgccttcattgttcctttcaaggccattacacccaaatcaattgcagaagcatccttaaaaaatcctcggtacttgccaaaaggtgttcttttagctgcaacaatataaatgtccttcatatattttctctccataatgtgtattttttaacaaatatgataatagcaaaaaaatattaagaaaaacataaaaagactacgccgcagcgtagtctccctaataattaagcttattttttattttgcttaccttcggcttcaaactttttgctcaattgcatgatatatgcccgcaattgttccttaatttctgggtgcttcaaaccatattcaattgaagtttcaaggtagccttctttgttaccaacatcatgacgttcgcctttaaagacatgagcaaagacacgttgagtcttgttcattgtatcaatcgcatcagtcaattgaatttcaccgccacgacctggtttttggttagccaaaatatcaaaaatttcaggtgttaataagtaacgaccaataatggcataatcactaggtgctttatcaatatcaggcttttcaacgaatgacttaacattgatcagtcctggcatgatctcattttccggttcgatgacaccatacttagaaacttcttcatgtggcacaggcataactgcaattgtagaagcatgcgtcttgttatagcgatcgatcaattgcttggtcaatggcaccttatcttccattaagtcgtcgcccaacataactacaaatggttcatccccaacaaaactgcgagcacggaagatggcgtctcctaaacctgctggatgcggttgacgagtgtaatacaagttaacgcctaaatcagtaattccttcggttaggcgaagcaattcttttttacccttttcttccaaatcttgttctagttctggattagaatcaaagtgatcttcaattgggcgtttgttcttgccaattacaattaaaatatcttcgattcctgactttttagcctcttcaacgataaactgaattgttggtttatcaacgataggtaacatttccttaggtaaagccttagttgcaggtaaaaatctagtacccaaaccagctgatgggataacggcttttcttactttcataaaagcacactttctatttcaattttataagttcatcataacaaaatatgcatttttcagctacttagtttttcgtcttttcttttgaatataactggcaatacgaccagcagaatattcaacttgtccaacacggtttcgcacaatagcagcgttaacaccaacgccaaataaaaataatactgctgcaatattcaaccagagcataaagatgataaacgtaccaacaatgccataattctcccaagtaatcgggaaatggtgtaaatagaaactaaaaagaaatgatagggctaaccagcctacaacagttacaaaaactcctggccaaattactctctttttgagttttatattaggcaaaacatagttcaaataccataatgctagcatcataaccaatattaatactggatagcgataactaaagatcttgctaatttcattaagtggtagctgaaaaatcggtcctaaaaagttgagtacttgttgcccaaaaaccaaggccaatgtagcaattgtaaatactagaatcatcaatcctgtaaaaacaaaagtaatagttctagtccaaagaaaattaagcattgataattttaattcaacttgatgaaccccataaagtttattttctccaagacgaattgcattaaccatatttgataatgaccaaactgcaaacacaataccaaaagaaatatagcctgttgatgtagttttcaataaagaatttataattggcataatgaatttagacacttggtctggaaaaaccaagttcaaatattcagcaataggcgcagtatcaatgtgaaacaacggtaacacgttaccaatgataataataatcggaaaaatagaaaacaaaatgtagtaggcaataataattgaactagcaaatatctctccttgagataaggtggttcgtaatgtagaaataaattgcccaatttttaaaccaaaatggtttttaccatttttcatccattatcctaatcatccatctcatcaaagtgagggatgtacttttctaagccatcgtaaggatgctgcagggtcaagatcttaggaccatcttttgtaattgcaaaggtgtgttcaaattgagcagcattagaaccatctggagttgcgtagtaaacccaatcatcgttaggatcatcaacagtacgttggtcgatgtgccagtcgccaccagcttctaccataggttcacaagtaatagtcatgccttcacgcaagcgaagaccatgacctgccttgccccagtgaggaacttctggatcttcatgaattgatggttgaataccgtggccaattaattcacgtacatcaccgtaatgattttcatcttcaacataatgttggatagcagcaccgatatcaccaattctgttacctaaaacagcttggtcaattccgagatacattgcttttttggttacttcaattaatttcttatcagcttcggaaatttcgccaactggataagtagtacatgaatctgattcataaccgttcaaattgcaagttacatcaaccttaacgatatcgccttcctttaagatgcgatcttttcttggagtttggtgggcaatttcatcgttaaccgaaatacaagtaccatacttataaccttcaaaaccttgttctgaaaggcggccgccacgacttgatacgaagtcttgacaaaactcttcaatttcccaggtagaaatgcctggcttaatcacatcacgtaagccttcaaacatagttgcaagaagatgtcctgaagcttgcatgcctttaagttcacgaattgatttaattgtaatcaaaataatttctcctttataaatttttatttagtttcagatatttctattataccgttttccaaaatacttttaaaaggtcgggtttttgtagaatcaaaacaaaactctagaaatacctgaaatatttttaaagtttgctaaaactaaacgtttttgcaatagtttcatgtataataaggtgtcgtataatgcagtgaaaggtatgaaaaatcatgaaagcaagaattgtttatgccagcatgactggtaacgatgaagacatggctgatattttagaagaagatcttcaagattatggctttgacgttgaaacaagtgatgtcggcttcactgatgccaatgactacttagatagtgatctttgcatttttatcacctacacctatggtgaaggcgtaatgactgatgaattggcagacttttatggggagttaaaagacttagatctaacaggcaaacattttgctgtgatgggttctggcgataagacctacggtgaacacttttgtgaaaatgtttttgactatgaaaaagcattcaaggattgcggcgcaactgaaattactaaacccgtaacaattgaaaatgcgccagatgatgatgcagtcgctgcaatcgatcaagctgcaaaggaaatggccgataagttaaatggctaataacaaaaaagacgtcacagctgttgatcaggcacaaatacgccgtctaggtcaaaaattaatcaagcgacaccgtaatctttgggtttacatggttttcggctttgtcgctgcattaatcaataccttagtcttcatggtcttacactcatggtggcataatgtgatggtaatttctaacaccatcgccttcatcgtctccaacctggcatctttctggtttaaccaaaaggctgtttttatcaataatgtcgatcatgaacacagcacgtggcataaactaatcgtctttttcacttatcgcgtcatcagtttaatccctgatacattaattatgttagtcggcttatcctggctgcatttaaacgcattactagtcaaaattatcgaccaaattttagtcggtgtattcaattacttaactactagatcagtctttcaaaagcaagaacatactatgattgaacgtgcaaaaatgcgcattcaagaacaaaaaaataaaagagacagcaaaaattaaaaccaatgtcattaagttaagacattgacaaattgaatctaatctctgtagaaccgaatcattatgatttggttctttttttgcataaaataaaggcgaaaagaacctaccttttcgccctctgattaaattattaaaccttcaaaattattgccagaaagctggtgttaattatgaaagcccttcacagaaatattttagatcgtcttgatcaaattatcaatgatactggaaagcatattcatgattttatcgatgatcctcatgccttcactaggaagcggtttttagatgcagctacagtcattaaaactactattaatatgcaaggaaaagatttgaccagtgagttgtttagagcttttggccaaaaagctattaaaaataacgataaagtagtcagtacttccgcttatgtccaacgcaaaggtcagctttcacccgcatgttttaagcatattctaactgtatttaatcagaatttatttaatatccagttatttgatcataaatatcgtatatttgccattgatgggtctgattttaatcaaatctggaatcctaaatcagagaatatcgttggaaatctcaatcataaaggaaagccatattgccaaattcatgttaatgcactctatgacctgttaaataatacttatcaagactgcatctttcagcctaagtcaaagatggatgaacgtaaagccgccattcaaatgcttaaaaagctaaattgcggaccatatatagttactatggatcgaggttataccggctttaacatgattgaaaattgtaatcgcctgcctaactgttattatgtcatacgtactaaaacgggatatggcgcatttaaggaagtagctgagttgcctaatcaagagtgtgataaggatatagcttgccgggtgactacctctaattattattatgaaacccataaggctacagaaaacgttcatttggttaaccatcattaccgtcaatatataaaatatcggtctaaaaataccaaagatggcagctgggactttggagagttatgtacaataaaatttcgtgcctgtaaatttagaattaatgatcctaaatcaggcaaagaagaatgggaagttgttctaactaatctaaatagagccgattatcccttaaaaaggatcaaagagatctaccatttgcgctggggcattgaaacttcattcaaaaagttgaaatatgctttaggtagcgtacagtttcattccaagcaggatagatttattgaaatggagatctatgcccacatgattatgtttaacgcagtcagtcaaattgatgctcaagcatatgtaccacaaaaaaactgcaagtatcaatatgcgatcaatttcaaacagtcatgttttgtcatccaggctatgtatataatttcttcttcaactgaaatctttaaaaagattcttattcaaattagtcattacacaattccgatcagaccaggacgaaaagacaaaagaaatctcaaacccaaatcagctgtatattatttatatcgtgtagcctaatttctaaacaagatttgggtttatttggcatgaaaaaagatcattcaaatgcgataaatcgcaaatgaatgatcttaaaagtccaagtcgataatttgtcaatgtcttaacttaatgacattgaaattaaaactgtctctttatttttttactcaaaatcttttggtttactttcactatcttgattaaagtaataataaatatcatccataattcgatcagctgcatgtccatctccatatggatttttggcattcgccatccgatcatattcgtttttgttttctaacaaagctagcatttcttcacgcaccttgtcgacttcagttccaactaacttcaaggtaccggcctttacgccttcaggacgttccgtcgtatcacgtaaaaccaaaactggtttacctaaactaggagcttcttcttgtacgccacctgaatcagtcatgataaagtatgaacgtttagctaagttatggaaatctaccacatcaagcggctcaatcaaatgaatccttggatcaccaccaagcacttcattagccactttttgtactcgtggagataagtgaaccggataaataatttctacatcaggatgcgaatcaattacttgccgcattactttaaatactcggcgcattggctcaccttgattttctcgacggtgcatagtaaccaaaatcaccttattaccaggagtaattgcgtctattacctcatgatgataatcttgttgtacagtctgtgctaaagcatcgattgccgtatttccagtaacgaaaataaaatcagaatggtgattttccttcagtaaattagccttactcaattcggtcggtgcaaaatataaatcggctaaatcatccgtcatctgccgattcatttcttcaggatatggtgaatacttattccaagttctcagacctgcctccacatgtcccaatgtagtttgctgataaaaagtagctaaagaagccgcaaaactagtcgtcgtatcgccgtgaaccaagacaatatctggtttctcttctttgatcaccttagataaatcaatcatcactttagaagtaatttcttctagagtttgattttggtgcataatattaaagtcataatctggtttaattttaaaaatatctagcacttggtccaacatttcgcggtgttgtgcgctaacgaccgttacttcttcaaaacgatcatctttttttagtttcaaaacaagtggtgccatcttgattgcctctggacgcgttccaaaaacagtcattaccttaattttcctcattaaaaaattcctccgcttaactattttactatacctgattttagactatcttgcacccgctttctgtgttttaatggaagtattaaattgaaagttggtcgatgcatgaattcatcattactattattaattacaactggtttaattattttgattggaactttttgccttgtttttggtatggacaaaaacagacccgctaaaactagaaaatatttactttatactgcactaatctgtgttttcctagtttggggcttaattactgcaattatgcttcaacccttaggataataaagataccttttggataaccaaagcatgtaaaaagcctgcaagaccaatacttgcaggcttatttctatgaccccggtgagatccgaactcacctctacggtttaggagaccattgttctatccagatgaactacggggtcaaacctaagattaactttaccaaaaaaagtggtaatagttaacctttttttagaattgtggattaaaaaatgttttcggatggttggtatcagcaatcttatcagctgctttaacaaaaggcatccaaattagcaaagcaacaatcatatttaaaatgcttaaaacaattgcaagccaatcataattgcaagccagaaatgggccaataactggtggcatgatgctaggtactgccacttgaactggattaaccaatcccataatgctaacccaataagaaaaggcaacattaactagtggcgctaatacaaatggaattagatacactggatttagcactacaggcaggcccacgagaattggttcgccaatgttaaaaattcctggagctagtgagattttggcaattgtgcgataatcactgcgtttagaaaacattaaaatcgccacaattagcattaaggttccaccagcaccgccaaaccaggcaaagacatcaaatgagccacgtacccatacatacggtggaatatttccattactaatcgctgtgatgttatcattttgagcagtcatccaaattgaatccaaaattggtgatagaacccctataccattaattccaaaaaaccaaaataactgcactaataaagtaatgacaattaccgtaccaaagccttgtccccactttactaatggagtttgaattgtggtaagcaaccaatttccaaaatatttaccggtaagaatttggaacaaataattaattccgcctacaccaaatattgcaatcattgcaggtaataaagaatcaaaagcagcttgttcagcatggggcaagttcgatgtcacatgcaaaataatccttgctttatagcaagcataataaataaaaaagcctaatgagccaaacaaaatagcagtaaagaggccagtagttgagaactgactaatgtcaaatgcattatgaagtgtaacattatcaccatgaaatttaatcttagctatattggcaatgcttagtgcaaaagaagataatgccacaattgaagcagcaagtctatttccttcaaaagcttttgctagttgatagcctaaagccaatgctaagaaaaaggcaaataatgaaaatgttcctcgccaaactaaattactgattgctaccaatggctgcatcgcaaaagcaaaggcataccagcctaaatgatcatgagctgcttcaattaagctcttaattaaaactgctaatgatcctgccattgtaattggcattaatgagacaaatgcatcccgtaaagcaactagccatcttatctgaccccatctactagctagcggcaaaacatagtcctctagccatctaactaaacgaatcatttctttcctttcaagtaatgtggatgatatcccttgttcttattacgtttcttgcgttttttagttttatttttcttagtcgaagtcttaatggactgctctttagcctgcttcttttccttcttgagtttaggcttttcagttgttaaatgatagcctgcaaagtagacacgctctatttgtaattgatctgccaataatttcttcaaatcacgaaaatcgtgatcatcgcctaaagtaaccacataaccttcagcgttcattcgacctgttcttcctgcccggtgcatgtaagtattagtctcgctcggaatatcaaaattaatcacataggtaaggcctggaatgtccaacccacgcgcagccaaatccgttgccagcagcaatttcgtcttaccagtagctaggtcatttaaggctttttcacggcgttctttaccaaattcattagctaataattcgaacttagtcttagtatgcccaaaaataccagcaaagcgcatcatcgttttatttgaatcaaagaacaaaattcccttaaagtgatccaacttagtcattcgctgcaaaaattcaatcttgtgttgattgtctacttgcaaaaaataatgtttagtcgctgaagcttgttcatttctgacatctactaacaagaaatgacggttaaaaacttgctccgcatcccgtgtaatctcagaatctgttgctccaaataataagatttgactgtctggacccagattttgccctaatgctgataacaattccattttagtaaattctaaaatatcatcggcttcatcaataatcaaagtcttgatctggtttactttaattcgaccacttgagaagaagtcaaaaaaacggcctggtgtagctacgaccacttcaggatgctttttcttcagattgtcttcttgtctctttctattgccagcaccaaccaagctgacgccttttaatcctaaagcgtggatgtaaggattaattgcatgacgaatttgtacagctaattcagtcgttggcgcaataattaccacgctgttagcattacctggctgtgctttttccaaactaggaagtgcataagccaatgtcttacccgtacctgtcttagccaatccaaccaggctcgcaccattgcgaatggcatcatagctttctttttgaattaaagttggctggtccttgtgttctctaattaaaacttgtttgattttttcttgatacattattactgtgttaattgcccatacttttgcttatattgaccaacggtcccgttatacgcgtacatcgttacctggctttctaagcctgaaacattccttacgcgtccgttagtagtgtagcaccaaaatgaatactttaatttattcggtgccttactatctgatgacataaataacgtttgcggattaaagtaatgttgatatttatgatcaactttcaccatgactcttttgccagctgcttgcaataaagccgcaaactgccccattgaccgcaaatatctcgctgaacgagtagtcactgccggtacaattagaattggcagcgagcccgtattttgtcctacttgcttaaaaaagtagcggtaatgctgcatcggagtcgattcattgctataggaaatctcactaccaaatgccaagttcgttcctaaaatttggtcacgataagacagatagttttcatcaaaatatgatctgccttgggttgctttcaaatatataaaggaaacgccattagattgcaatttatgtaaatcaacatagtcaatatcttgatttaactcaatcccaatcgcacttgaattagcatctggcggtaaagttgtttgccgcttaaaattgaaaaagccaatcaaaagaaatgcaatcgccagaattaataaagtcaaaatcgctggcaaagtatacctatgctgaaatcttttcatcggctaaattcctcccttaattattttaaccgaaaagcctatcaatacaaacatttccagtcgatggtaagtgtcaatgtttttgcggtagcctttaaaccattagtctaaccttaatttcttaaatatttatatgacttaaatttctgcttagcttgcttaaataactattgccagctacctgtgcggttaatgcgccatgctggatgcctaaatgaacttcatgacgcttctttaagctgtcacgggccgctgcttttaattcctgttcagtcaatacagttatttctgaatcttcaaactcgctgctaagccaaaattccagctctcgattcttgatgcagcttaagatcctaagcatgccttctgctccagattttgaccatttcttgccttgccccttaacacggtaggtatacttgcggtggttgctctcgcagcagccaatggctttagtcacagtcagttttcgtttcttaaacggcttaatatcgtcccaatgacgatcaatataattccttaggcgccccagataatcatgattgagctcggtattcaattcatcaattagtcggctttctgcagtggttaggatagttttaactttgtcatagctgtatttgtattccaaagcagaaatcagcttgccttgcaggtcaggcgcaaaatatagcctttctttgattttcttatttaggtgaaagacatccaagaaatgctcatgacgcttgcatagccctacaatgtcatcgaagtctgttttggcatatccagcaccgccatcggcgttgctaagaattacagtatcagaaagatcataagtattggccaggtactccttggcttcgttcagcgcatcaagtcggcttaaagaaacaaattccttggcattgattcgctttctgcgtttcttgcttatattgacaatgccttcacagacctgatagcgatgaaattccaaccggcttttagtgcctttgatcaccacgccatcgccttcaagatacaaaactgggacctttttcttagtgcctgcggcatcatatcttgaatctgcttcttggcccgctttaatatttttcccggccatttttaccaaattgcccacctgcatatggctaatattaaagccagacaggcaattgactgctagagcagtattgcgataagtggcaacgctgcttacttctaagatgtttttgactgctaaaatactgtagcgcttgtatttgtcaaagcccattaattcatccaagggataccttgcttgtttgcctgggcagacatatcttcttctgacatacctaacttcgccaaaagccatattgattgagcgctcattcttcttatcaatctgatagccctgtgctttaaccttggtaatcatttcatcatcaactttagctaaagccaaggccatgatttccttaatcaggtttaagaagaaacagattatttttctttcacgcttaatataattatcttcaggctttataatatttgcgatttcagttacaattgaattcataaaagaccagcttctaatgtgttttttgttcttaacatcagactactggtctttttgtttgagctcaagtccaaattcaaaggacttgggcttttttaattatttattcaacttaccgtaaaaaattatacacttagcagtcgatgtgctaaaatttaaataatgtaaacgaaaggcaacaaataaatatgaaacgacaaatctcattcggccaagcattggctaccgtagtcggttctgtcatcggagctggcgtatttttcaagatcggaacaattactgcacaaactggcagcacttcaatgaccctgtttgtatggattttagctgggatcatttcaattgcatcaggtttgaccatttcagaaattgccgccagcttaaaaattaatggtgccattaagtatcttgattacacttacggccgcgtgtggggttttctttttggctgggcacaaatgattgtttattttccagctcaaattggtgccctaagctcaatttttggcgttcagtttgtctccttatttggaattaaggcgaggtattctaacctaatagctatcttgctagtgctttttctcttaggaattaatctaatcggaactaaattttctagcaaaatgcagtcggtcatcactatcctaaaaatcattccaattgctttaattattatttggggattatttaatcctgccaaaatacctgcaccaattattccgttaacagtcggcactggacattcatttccaaccgccattagtcaagggttactttctgcgttattcgccttcgaaggctggattgtagtgactaatttggctaacgaagtcaaaaatccagaaaaagacctttcacgggcaattattttaggtctttcagcaattacattgatttatgttttaatcaattatactttcatgaccgttttacctattgatcaattaactaataacaataatgccgcgtttcaagcttcaatgaaattgtttggtcagtttggtggaaaactagtcactgtgggaattttaatttctgtttacggtgcggttaacgcattcatgctgacagggatgcgtacgccttatatcttggctcaagacaatttattgccattctccaataaaattggcaaggctaatatccataccggtgttccagtagttggcgcgtttattgttgatgctattgcaattgtcatgattctactaggtaattttactgttttaactgacatgctagtcttcgttatgtggactttcaacacaatgttgtcagttgccgtaataattttgagaaagcgtgagccagaattaaaacgtccatttaaggttccatggtatccgatcattccaattatttccgtgatcggtggtatcttcatcgttgtctcaacaattatcaatcaatttgttctttcaattattggtattggtttaacattgttaggactgccaacttactattacatgcaaaagaaaaataattaacgaaaaaagccgccgattttgggcgactttttatttgagtaaatatatttattaatgttgtgaagcaccgctagttgcatcattttcttgatgatcttcataggcagtattggcagcaattcgaccaaaagtgaaaatatctgccaaggagttaccacccaaacgattaccagcatgaatgccaccagcattctcaccagcagaatatagaccatcaataatttgaccatctttattcaaaacatgtgccttagtatcaattactaagccgcccatagtgtggtgaatagcaggctttctcggagtagcatagaatggtgcaacttcacatttgaggcctaatacattcttatggaagtctggatcctcgccacgatcaacgtaagaattataatcctggatagttttaaccaaaactgctggattcattccaatttgttttgccaaatcttcaagcgtatcagctctaaacaaggttccagccttaacttgcgcatcaagtgactcttgggttgtattgtaagcagtgtccttaatcttatcgtccgcaatttgataaatcaaaccaccattttcgataactgccttagccaaaacatcccgttccgcaaattcattaacaaacctcttaccctttttgttaaccataatatagttagcaggcggagttacaacaccagtgaaaagctcaccggtctttggatcagctactggcattaattggataaagcccataccgaataagtctgcaccagcttcaagacctaagttaatcccatcgccagtaattgcaggtgaattagttgttgtactatcgtctgcaatgtttggccaataggtattgtatttttgaaccatcttagtattggcaccaaagccacctgccgttaaaattactgccttagcatgcacagtcaaagtactactgtcagcgcgtgttgcaattacaccgcgtactttgccatcttcaataattagtttttcaacacgagtttcaagatatggatcgacaccatgctctcttatccaatcacccaaaacgtgaataaaggcataacctaatggctctactggcttatgacctctgcgccacaaaccaccaactggttctgtaacttgagaattatcaaacttaacacccaaatcttggagccatttaacagaatttaaagcattagttaccaattcatgtaccaaagcatatttaccatgaatttcgttaccttttaaatcagtccttttaccacctaaataagtttgaatttcatggagtaaagtcgaatcaaataaataatctgtaccagaatcaatatattctttgatttgtctttgtaatctttcaaaatcaaagcggtattctaaatcaatttgttcaattggcgtattagccaagtcttctaaagtctgtttttcaccaggaagagccttaaatttactttgccattctggttcagccgcattcattggaccaccagcacggctagtattaccaccgatctgtggatacttttcgagaacagccaccctttcaccatgttgaattgagcgaactgcagctgctagaccagcgccacctgcaccaactacagctacatcaacagtaatttcttcatcttctacctttgtagcagcgggcttttcacggtttttccattcggttgaatcgccgcctgcttcatcaattgcttcggctacgccatcaatcacaccatgactggaaatagtcgcgccactgaccgcatcaacgtttaaagtttgattttccacaattgttttaggcaaacgtctaaatacttcatcggctactcccttagtttcacctgatgaatctactttgattgaagtaactttatcgccatcaatgtcaacttccattggcattgattcggaaccatgacctttagcttttacttgatattttcctgacttcattgcttacacctctaataagtttaattttatccacaagttaatattagtgcgtcatctgttgatgtatcaaatatcaatttcactatactttcataataaaattgttatgagataactatgtttcgttctccaaataaaaaaagcttaatgcaaatagttatccacattaaactttttaattgcatgatttaattaataaactgaaacttgaaagctaagattaacgctccttccccgcgcctcttggctttttcttatcaaaaataaaaacgcaggatctctctgcgttatactttaagtgtcaacctgaaaagtaaaggagatcctacgcaatgaacagtatagaacaaatcgacacagaaaacgataccaaatccttaatttcttcatttattaatctaattggtctagctaagttgactaaacaagtcaactttaagcgtaaatctaccgtttcattaaccatgattatctcttggctgatgtctgtacattttgctcggctttccttattcagagctaagagtgacaagcgtttttccgttagaactgctcgcaatgtacttaacgatggaagaatcaactggcaaaaactattatgcttgattgcagctcggctcattggctgcttcaaacatccgtaaaaagaaacattatctttattcaagcatagttgaggctcaatatcatggacatatctttttattaaagctcgtttttgtctccaaccgtggaaacaagaacaagtatttagttttagctactactcagacaaagcttagacctaaagaaatcatccaactttatggtcgtagatggcaaattgaaacatattttaagacgtataagcaatatcttgctttagataaatctcaagttcaaagctatgatggacaatgtggctatatcgcagttacagcaataacttatgatctattggcctggcaggaaagacaaaatacagatgataagacaatcggagatttattctatctaatgaacgaatccttacctgatattagattcgtagatgcattggtctacttaatttcagaattaaaagagcttaaacagaatagttttgaaaagatagatgaagtaatcaatgactttattaaccaactgccacgattcatacaaattgcactgaaacagatcatataaaaactaattacgtctagaaaagctcaatagtgacaggacttgagcttgattttggtgctttcaagtttcagtatttaaattaagcttcagaggcgcctgatacagcatctgcttcttgttcatttgaaacagtaaaataattataattggtattatccgcagcagtcgtacctgcaacaaaaccagaagcatagctccaagaattcatcatacttggcattgaatcatgaccattagcaccaccaacaatttctcctgcagcatagaagttacttacgggattcatatcattgtcaagaagctgcatttgatcagtagtttcatatccacccaaagttgtgcagaacagaagtttttgttcaattacataatatgtatcgccttcgaactcatgcataaacttcttgtctctaccaaactcaggatcataatctgctttaacatcttcagtatagttatccacagtttccttcagcgtttgataatcaatacctgctttttctgccacggtcttcaagtcgcctttgaccagaactggactcttctcgccaaccaaatcaaagaatgattgaacctcttccttggtaaagccatacttaagcattaattcatagaaacggtcccaggttctttgatccatgacaatgtaagctaccttacccttttgttcagcaatcgcatccctaaaatgcgtataaggtgcagattcgttaactattctcttaccatcagtattaacaaaaatagcccccatatcggtcgcttctttagttgaataagttgttagcttagcaataccaggttcaacttccaatccatgtggatataccttataccagtctaagttacgagtaaccaaattcatatttttggcaaaatcaagataatcaccagttgaagtcattggaccataatatggaatatcagtcttatgagcctgataatcacgtgcaccccaaccaccagcagctaaaacaagtgacttgaaattgacattaattgtctggtgcttgccttcagcggttaaagataccagtttgccagccttatctttattcaacttttcaacacgggcatctaagataatttgtccgccctttttttcaaatgcctcagccaccttagtcactagttcatatgagctttcactaggcatttcaatttgacgatatacactatgttcaactgtttgggtttccgctttttgataagtcaaatttgcaaattcagtaataaagtctactgccttcccaatattgttagctaatagctttgacaacattggataattagtaccgcggcattcacgagtaatatcttgaactagtctatttggcgaatccttctttgccgtttcaccaaataattctgcagaaactttagagccagttcctacaacatttgagccatttaaaatagttgctccacctaaatagccatttttttcaagtacaactacttttttacccatcgaaagagcacgacttgccgccattaacccggccataccggagccaattacagccacatcaacatttagttgcctttcttcatgtacgacttctggcttttttccgtcaagagcaatgttattttcggctaatgcttttttaccagaatctagcattgcttgagtcatcaatgatgccccagaaacagcgtccacgtcaaaactttgattatcaataatatttttctttaatttaccaaaagtttgattaaaaattgcaggagtttccgaattcttggttactttgacatcactaattttattgttttctaagtcaatctcaaaatcaatttgaccattgcgaccatctgcttgagctttaatagtttgtttggtcataaaaactactcctttacttgttctttttactaaaccgcttatattataaccacaatattaaatctaaaaaataaatttaatttgatattttaatagaatttttttatcaaaagcagtaaataaaagcgagtgatcattctcactcgcttgattctttatctaattttcatccttatttattagcgtaatgttgaataacttctggcttcaataccccaacataaggaaggttacgatacatatttaaaaagtccaaaccataacccactacgaattcattgccaacctttgaaccataatattctaattcaacatcggtagttcttctggcttccttatttagcattgcacaacacttaacgctcttagcgccacgtgccataatgtgttctttcatgaatttcaaagttaaacccgtatcaacgatatcttcgacaattaaaacatcgcgatccttcacgtcagttaccaaatctgatactatcttgaccttaccagttgactcaaagccatcaccataactagaaacatcgagaaaatccagttgatgtgctacgtccatttgtcgagttaagtcagtcaagaagtaaattgcacccttcaaagccccaacaactaccggctttttaccagcatagtcctcagttaattgcttacctaaacggacgcacatctcatgaatgtcatcttctgtgaataatttgtgatctataatttggtcaatattgtcgccttttgccatttaatctacccttcaattcaatttacatatattattcctaataaaaagaattataacatctttaaacaaaaaaagcgtcattttcaacgcttcctctgaataatttctaattttcatcctttgattgatcgtctttttgatctttatccttaatcggttcaacgataaaccagcgcataaagccttgttcgatactgtctaaggtaaacttatatccttcaagttcaattgattcaccctttttcaagttaggataatgttccatcatgtaaccaccaatggtaataatatcgctatcttgaaaggccttcagatctgtatggaagaaacgctcaaagtcatataaagtcgtcttacctgaaacatgaacttgaccatccttgtccttgataatgtaatcatctgaaacatcatcaatttcatccttaacagaaccgaaaagctcttcataaatatccttatcagtaacgatcccactagtaccaccatattcgtcaactactaagacaattggtgtgtgcttagaaatcatcaagtgcaagatatcttgaattggcattgattcaggtaccgtgataatagttctaataattcttgttactggtacgttgccatcaatttggctttgttgcacaatgtcgtacgcataaacataacccacaacgtcatctttatcattatcacgcacaactggaaaacgactgtagccttcttccaagtattttttcaaggcataggcaattgtatcagttgaatcaagtactgacaatcttgttctgtcagtcatgatgtccttagcaaccttatcgtttaattcgaaagctctttccatataagttaagtcttctttatcaagcgaaccaccatgaaccgcattacgcgacaacttgatgatttcagattgtgaataaacttcattttcttcatcagctggagtaaagcccatcaattttaagattccattggagctagtatttaatagccaaacgaatggataaacaatcgtatggaaaatatgaagtggcgtaacgatccccatcatcatcggtactggcttgtcaatcgcaatattcttaggcacaacttcagttaagacaacttccaaataagttaataaaactacgcctaagattgcactaactgacttgatgagtgaatcattcattggcgtcaaatggaaaagatcttccaatatggttgcgaatgtatcagccgagaaccaacccaagactacaccaaccaaagtggtaccaacctgagtagttgacaaatactcattcaagttgtgcgtcatatgcaaagcacgacgcaactttttcttatttccttgacccttagcaagcatatcttcgagctgacttggtctagtttgaactaacgcaaattccgcagcaacaaagaatgatgcaacgataaatattaataatgttgcaactaaattagttactatttgagctggactcaaagtattatcacctttttttacaaatatattactaaaacctattttaccatttcttgcctaaaatagtgcagttttacacaagggataacggttttttgtaatttattcgaccaccttgtaaatttcattaaacggtacacgctttggaataaatttaggatcattaatttcagcattcttgtcgatatagccaactgcaattgccattccgacagcttcatcatctggaatttgggcatattctctaaccaattctgggtatgaaaccattgagtgagctggcatcacacctaagccacggttaatggctaaaagcatgatactttgtgcaaaaattcctaagtcaaaaacggaccaagctggagatttcttcggaaccgttaaaaagataattgctggtgcattgaacattgttttattcgcatcattaaataattgaagcttatttctgaaaaagaaactttgggatgcacccatcgtagccatattacgacttggataagtatcccaatctagtgatagcattgaagcaaaatcttcatgtgcaacttctttatcatcaatctttttagctgaagcagccttaaacttgcttaaagcatcccccatcaaaacatatgcacgccatggctgagaattaagcaatgaaggtgattgctgtgccattttaacgattccagcaattgttttttcttgtaattttctattagtaaacttccgcgttacatgttccttttcataaacatccttaaaattcatttttcctcaattcctttttgcttatataataacaatctatattttattatagtaaaaaactgttaaaaagcttaattattgctcttttcttgctttttcttttctgctgcctgtttttttaaataagcactcattgcaagatcattttttcgcatagcaataaacgcagtaatggttaaagttaatccgccaagacaaatcacaagtaagccaatcggaaacaagaagtctgctcccttaggaataaatgatgccttaattacccagcatgctataccaattaacatcaaaactatacccacaatgactgccttagtgttcggtcgatatcttttcataaatgcccttctttcttaattaacattctaacagaaaaagcttagcttcaacgtagaagctaagccgaaaactagagaaatagtcgttaaatttttacatgagagaggggaaagttgactatttaagttcgatagtttgtactttttgggaatgttcaacactgcctttttcaatcggagtaactgacttaatcaggtccatgttggtgtagacaacgatgcagctgtcatcgtatcccttgtctgtaatcatttggaaatccattgtggctaagggttgacctttcttaactttatcgccttgactaacattcactgtaaacggagcaccttttagttcaacagtatcaagacccaagtgaatcaaaaactcaataccttggtcattcgtgataccaatagcatgtttagttgggaagagtgtggaaatactaccatcaactggtgcatagatatgattatccttaggcttgatagcatagccatcacctaacatcttagttgagaagacatcgtcttttacatcagtaattggcataatgtcgccgtcaactaccgcatctacttcaatacccttattctttttcttaaagaaattaaacataattaataacctctggatttctaaaattcaagtaataatatcaacataaagcttgcgagtaataaaccagctgcagtaagtgaaattgcgattattactcgactaacgccatcttgtgtcttcttcaaagctcttgctcgataaaaacctaagatagctaatactacgcaaagcaagttgccaacaaagagctgagcaatcatctgacttcccatcaagaagcgataagtctgtcgattgattaaaaactgcttgtggtttaacaacatatagtagcctagtatgaagtcaacgatagcaacgattgtactaatcgcaatcatcggctgcttcataatcatcatccgaatcgattgaccagaagcaccgcttcgtagtgcaatcatcgcccaaaacaatagtggagcaatgaaaagtacgtatgaataccaagtcaaaatcttcttagtatccaagtgcatgctttcggttattcgatcgataaagttgccaacttttcgtttactaattgcccacattgatctctacatcctctccttgactctgttgccaagctacatattcactaattaccaaatcaattaagaagtacgctggggtaaaggcaaccttcccgctcttaaagtcggcatcatcagtaaaggcaatcgttggaaaataaatgttgtgctgcactaatgaagctaatttattttgcttcaggttagtgaacgaaacatatttgaatttatcattcactagttccaacttagtgatttcctcattgatcgttttattatcacccgtaaacgagataataaacaaaacatcgcctttttgagcaaagcgtcccgcagcttttaactcctctaatgctgatggcaaaacagttgcatgcttgccaactacaaacaattcatgagccaaatattgtgcgattaactcttgttgccaaccagtagagtaaatgtaaattgtccctgcattatctaaatcgcgatacaagctattgaaatcacgttgtttgaaatacttcaacacgtctgaatttactttactaagttcccgcgcaaaattattttcaattttgattggtttttgcttcgattcggctaattcgaccaaatcaaatttaagctcactgtagccacttagtcctagctttttacataaccggaaaattgcggattcggatacataaagctttttagctaatttggctaagcttaatttgctacagtctctcggattatttagaacatattgaactatctgtttttcagaatcattcaacttatgactattgtcatagaccattgatctcaaatttgccataatacctgtgcccttatcaatatataatttatatattaatgataacacaagcgctttcagattatagcaattgtttcatttgatcaacaacttgatcggcatccaatccgacaacgatgtcaacctcgttgttatctttatgttgtacttcgtaagaatctgcgatcttcttgaattctgaatctggagcgaccttcttaggatcaacgacatgagttcttactctagttgagcaagcaatgacatcttgaatgttggagtcaccaccaagcaagtcaacgataccagtagctctttcaatataaggattatcttgttcagttgataccttagcgtcgccaccttgttgttgcattaaagtgttcatttcatcaagaacttgaggtacgtccaaacctacgataacttggatagccttaccgtggtgtacgacattgacagccttgtttgctttaaatgcggcatctgaagcaactttatttggatcggcaacagatacacgtaatctagtagcacatgaactcaattctgtaatgtttgaaggaccacctaataattcaaggtaagcagttgctctttcaatgtaagggtcattagcgtccttaccagcagcttctgcagccttcttagccttgtattctttctttgaaagaaggtgaacatcttgatcatcggcttcacgacctggagtaatgtaattgaacttctcgatcatgatcttgaagacaaagtaagtaataataccgaagataataccaacgataaattccatcacataggtcttccagtggtttggccaaagtggaatccagttcattgaagcgataccgatcgcaccatctgacatgaatcctcttaaaccaaaggcccacataactgtgttcatcgtggctgacaatactgagtaaactacccaaagaactggagcagcaaacaaataagtaaagtcgataggttcagtaataccagctaatactgaggttaaagcagctgggataagcaaagctgaagtttgcttcttcttgttcttcttagcagttgcgtagaaggcaagacagataaatggtactaagaataccttttcgttaccgtaaagttggaatccttcaactgaagcgatttgtgaaagtggtttagtacttgcagcgtattcagcaaggtgtttcaaccagtatggttgcaaaccgccggcaacaacggctggaccgaattggaatggaatgtataccaagtggtgaagaccagtaggaatcaatacacggttcaagaattggtaaatccaaacaccgataaatccactatctacgatgaagtgttgcatgctggtgatacccatttgaacttttggccagccccagcaggtaatgagtgctaaaggaatcattacgaagaatgctaaagcgtagacataagttgaaccttggaaagtaccaagccagtctggcaacttcttatcaaagtacttattgtgtaaccacactacaataagagcaacaaccaaggcacctaagatactagtgtcaagagtcttgataccagcaatgttagttaaaccatggttagtagcgttagcaacaatttggatcttgtcaaagttaggaataccaaaagctgcaccccagtgggtaagcattgcaccgatgaagtagttgtaagtcaagtaagcaataactgcttccatggctgctctacctctagccttgttggctaaaccgattggcaaacctacagtaaacaaaataccttcttggttgaacactgtccaaccaccagctgaaattgtgtcccaaactgagttccatgtagttcccgggttggcaattaaaccaaacagagtcgggttattgaacaaactacctaaagctacgacaatacccgcaaacgagaacagcataactgggacgaacatagcggccccaaaccgctgtattttctgcatcataatcgtttacctctgaagaaaaaaattaaatcaataacttattcttacatctacacctgcatctacatctttatttcatcagatcaagtcaaccgcaaggtgctcatacaattgacttttgccatttgtgcttcacacaaatatttactcctcaaaaatgttttaagataaaacgtccagttgatatcaaattctgaacttaactctatcttagtagctagcttacatttttatttataccatagttttaagctaatgtaagcgttttttaaaactatgacttattgtttcataaagttaagatgatatttcatttcatgaaatttatttcagcccttcaatgatgtatataccaatatttatacccctttattttgcttgtcgcgcctatgtttaatcatttactttacatacaaaaataacatgtcaataaatatgctatagacattctctatttatacacataaaatcctctgaaatatatttcatttcatgaaacgaaacaagtgataaaacctttttcctttccaagatgaactactttgcttactgaaataacacaaagtctggcataattaacggtaagttaaatgcacaggaggaattattatgacaatcaaatttattgcacttgataccgacggtaccttgcttaattcaacaggtaagattttgcccagtacaaaaaaggcagttaaaacagctttagaccaaggaataaaagttgctttatgttctggtcggccaatcgcaggattaaaacattttatggacgaattaggaattattggacctaatcaatatgctatcactcttaatggcgcaattacccgcacagcagatggcaagataatgactaaagatctagtttctaatcgactttatcgtaaaatgtatgcttttgctaacgagcatcatttaccttttaacgttgtttcccctgattcaaaaataattacaggagatcatgatgttgatttaatggtttatactcaagcttacgaaaatagtgcgactttatacattagagagctagatgaattgcctagtgattttgaaattgctaaaggttgttttgccactaaagctaagttgttagaccaatgggaggataaaattcgccaagaatttgggcaagagctgtatattgttcgtgccgacgattgcttcttagagctacttcaccctaatgttaataaaggaaccggattaaaagaattaactgaaaaacttggcattactccagaagaggtcatggcaattggagacgaaagaaatgatattaccatgtttgactttgctggaacagctgtttgcatgggtaatggctccgaagaagcgaaaaagcatgctgattatgttaccacttcaaatgacgaagatggcatcagcaatgcttttgagaaatttttatgaacaacctaaaacaagtatctgagaagtgattaatctttcctagatacttgttttattatttgttcaaatattcacgcaaagctggcaaaactttctccgcctcaactcgtccgacctcatacactcgtcgcatctcttttttatctgtttctaaagtgccaatttcaagcggaaacggtggacgaataataaaagcttggtcagcagcttcatcttttaccatctgatcaagcaccgcattataatcctcagctttagtagccaatttttttactactgcggggtatttccttaaaattactttttccagtggatagagcttactctgctttttgcgataagacttcggctgtgtagcaatgactacctttttatcacagttttgctgctctaaaaaatcatacggaattgaatcagatacaccgccatcaaagtaataatgcccatgaattgcaactggatgagcaaaaaatggaatcgacgacgaggctctaatccactctaagtcaacataacctgcatcatgtaattgatgataaaccggctcacctgttgcagcatcagttgcaacacaccaaaagtccattggattagtcataaatttttctttatcaaaaacatccaacttatcaggcaaaatatggtaacaaaagttagccgcatacaaattgcctgaccgccgccatgatttccaactagcataatatggtttccccgcaaagcgcatgttgtagcgcaatactcttcccttttgctccgacttcaagtttacgccaaaggcagcaccggctgaaacgccaattgctaaatcaaaggttatgtcattttctaaaaacacatcaattacgccagctgtaaacagcccacgcattgctccaccttcaagtactaacccacttttcatattttccctctttatcaaaaaagacctacgcttttcgcataggtctaatttattcttattttaattttacttcaagcccgaccattgccattcggttacttctggcatgtctttaccattgtcgcggatgtattggtggtgcttttcaagcaagtaatccatgtgactgatgaagtccgcattcttgcccttcaaagctgggatgctttctacggcatccttagctaggtcaaagcgatcaagatgattcaatacccgcatgtcaaatggggtagtaatatcaccattttcttcatagcagtgaatatgaacattgtaacgcttgcgagcaaaccaaatggattccatcatgctcttgtagccatgccatgcaaagattactggtacatccttagggaataatctgtcaaattcttcagttgacaagccattcttgttgtcctttggatccattaacttcataacatcaactacgttaatgtagcgaatcttgagatctgggaacttcttatgcaaaatatcaattgcggccaaagtttcaatagttggctcagtttcagttgaagcaaagacaacatccggcttagcacccttatcagttgaagcccagtcaatgtagcttaagcccttgtcaaccaacttttgtgcttcttcaattgagaaccattgtggacgaggctgcttagaagttaccaaaacattgatgcattctctatctttcaaggccttatcgccaactgccaaaagcgtattagtgtctgatggcaagtattcatgaacaagatctggacggttcttttcatacaagtgagtcaagatgcctggatcttggtgagtgtaaccattgtggtcttgttggaatacagttgaagttgcgacaaagttaagtgatggataatcatgacgccagtattgttccttagcctttctgagccacttcatatgttgagtaagcatagagtcaactacccggccaaaggcttcataagtagcgaagaagccatgacggccagtcaaaacgtagccttcgagaaagccttcatcttggtgctctgacaattgtgaatcaattactcgaccgctaggagccaggttttcatcatttggttcatgaatctctggttcccattgccgcttttgatcgtcaagcaattggaacagacggtttgacttggattcatctgggccaaagccgcggaaagtagttgggttgagcttagcaacttcatccaagtacttagcccattcaaccatgtcttgtgcctccatagaacctggcttgtcaaacttcaaagcaaatttgcggtagtctggcaagttaagccgcttaggatcaagaccaccgttagtgattgggttcatggccattctatgttcacccttagcagtgttttcagttacgatttccttaggtgaaccgtcttcattaaacaattcttccggcttgtagctttccagccaatcagtaagcatatcagcgtgttccatatcgccttgagcaactggaattggaatttggtgagcacggaagctgttctcaattgggttgccatccaagtccttctttggaccagtccagcccttagggcattggaagataatcattggccagtgtggcaaagtagcgtcattgttttcacgggcgtgcttttgaatagccttgatttcttcaatgacttcatccatggtcttagccatttcttcgtgaacctgcattgggtccttttcaccgtcaaaacggccacccttaaagactgaaacaaagtgaggatcccagcccatgccacggaagtattcggttaattcttgatcgctcatgcgagaaacaatggttgggttagaaatcttaaagccgttgatttgcaagattggcagaactgcaccatctttaattgggttaatgaacttgtcactaaaccatgaagcagctaagggaccagtttcagcttcaccatcaccaatttcaacagcggcaataacatctggattatccaaaacagcaccagtaccgtgtgaaagtgagtagcctaattccccaccttcatgaattgaacctggagtttcaggagcagcgtgagaagcaacaccgcctgggaaactgaagcgtttgaatagcttagccatccccttttggtcctgggtaatctctgggtaacgttcagtatatgaaccatcaagatatgagttagaaaccattacctgaccaccgtgacctgaaccctcaatatagaacatgttcaagtcatacttcttaagcacacgattcaagtgagcataaataaagttctgtggtgcaatagtgccccagtgaccaattggcttaggcttaacgtcttctgcaaccaatggggtcttaagaagagggttcttcatcaagaacaactgaccaactgacaagtagttggctgcgcgccaataagcatcaacgctctttaaatagtcttttgagtcataatcaactgccatcttattctcctttgagcatctaagagtgctctttttcatttgttcttttgtttacacttatatcataccaagttatctaaaaagttcaactatttttataattggatcctaccaattaaaaaataagtatttaatttaaaattgcatcccttttttgttgctatatcaaccttttaatgctttgatataagtatttagttgcttaaatactgataagtacagataaacaaatatcaaatactgacataatcagtgcaaaattattcattcatgttagattactaaatggagggcatgagatgacccaagaagaaagattaatacaaattaaacagttacttaaaaaaaagcaccaattatcaactagacagattgcagctcacttcaatgtatcatttgatacggcaagacgagatgtaattcatctaactgaaactggtcaagcaattagagttcatggtggtttgatggaaattaattgcaacagcgtacctgattttttagcaagaaatcaagtacaatcaccggttaagatgaaaatggctagaatggcaaagagatttgttcatccaggtcaatgtgatttcatcggttcatcaactacgttaaagcagctctgtccaatgcttaatggtattgacatgcagatcgtcacgaattcaatcgacaacgcattaagcttattagcaatagaaatcccatcagtcagattgttgggcggcgttatcaacaaaaagcagcgtttcatttattctgaaacagcattagaaacattgcgtcaaatccatttcaatactgcatttattggtggatctcgaatcagagatgacggcgtatatacaccaagcatggctgattccaaaattgtcgaaaccgccgctagtcgcgctaatcaagttgtattagttgccgaaaaatataaatttactaatcaatcctcttcgccatacatgtctgttcccctcaatcagatcgatgtccttattaccgacaccccattgcctgaggaattaaagcatcattttaatccaaaaacgcaaattatacctgttttaaaggagtgatagttatgttcagtctctttaaccaaaagaaacaaagcgaaagtcgtgaagtataccaagatttgaagaatttttataatagtttttttagcaatatctacaatgaaatgaatattggtcgctatcggcagattcgcgatgcaattgggcttgttcttaataagttcgacagtggtgatcatcctcttgaatacactagcaaattggtcatgtatattcaggctcgaattgccatgaatcacctgcatctaactcatgaacagcaagacctaatgaaaaagctaagtgacgctaccaaatatgtaaatctttcttatgtttatctgagtccgctcacttcggtagaacaatttgttaatatttaagtgtatctagaacctgctctagatgaaaaaatgaatcccaaaagaccgagtagctgatctgctcggcctttttatgcaataatattgttaaaagatatagattttttcaaaggaaataattatgacaaaattaccattcaaagttgttgctgtcgatatggatggcactttcatgcatgatgatcaaactttcgatcacaagcgctttgaccgcatcttaacagaattacacaaaaaggggattcactttatcgtttcaagtgggcgcccttataccagattacgcaaagattttgctggctttttaaaccgaatcgacatgattgctgacaatggctcgcttttgcttcaagataatcaaattattagcactcatttgctcacttataaaacaaccttagatctaataagttttatcaaagagcattattccaagagttcaattattgtcactgggatcaacaattcatatacaactattaatgcttctcctagttttaagcagacgatgaacttctattaccccgatcgaattgaagttactgatttagcagcggctatcaatccgcaggatatgattactaaaatcaccttaagttatcaatatgatttttccgcggaattagaaaaagaattcaaccaaacccatgccgagaagattcactgtacttctagtggtttcggtttgcttgatattgtgccttacagcgttaataaagggagcgctctaaaatacttcttacgctattttggtgctaaacccaatgaattaattgcctttggcgacggaatgaatgatgctgagatgttaaaactagccgattacagttatgcgatggctaatgcagaagatcaagttaagaaaatcgccaagtatgaggccccgagtaacaatgatgatggggttttagaggtgcttgattcatatttagctaaagtagagaaataataattactgtaaactaaaaccgtctgaatgagcaaaataaaaaagtagccaagttttcttaaactaattgacttaagaaaacacagctactttttatttacccaaattaacaaaggtattaaagttcatataatgataatgcacgcgcatatttgatacttcaaacggcgtcccatcatccaagaagaagatcccttccattacaccaacaggttcagtcggcttcaaatttagcttctgctgatcttcttcattcgatggttcaacagtgatattcaagaatgacttagtaacggtctttccctgttcatcttccaaatagttaaacaaagacttttgtaaagtctctggctttaattccggcacaattttaatcggcaaatatccagtctcaattaaaaatggttgttcatctaacagtcgcagacgcttgaattcataaacaaaatcattttcatttaaaaataagtcttccgcaatttctttagttgccttaatcacatgaaaatcaagcaacttaatttgttgttttttaccagggactttaaaagaatcagtgattccaagattcgatccatcataacgaaacattgcctgtttgcgcaaatatagtggattaataaaagttccactacctcgctttttaaaaacgatcccttgttgagccaacagctccagcgcacgcttcattgatgatcgacttacctgatagtgttcggctagactgcgttcatcaggcagtcgcatccccttatactgattattcaaaatattctgtttaatgtcatgcataactgtccgataaacataatctgccattattctcgtccttgatctgcctttttaatactatcaataaaccaagttgcaaacttatccaagtccacatctgtcgcaatctccgcattggcatgttcttggtccataaaatccattacgctggcaccataagtatattgcccgcgcaattcaatattcacatttgcctttttcattgtaaacatttccggatgaagcataattccaactgcagtcggatcataaatcttaattcgcggatcaccgtctggttcatgaatgttagagaaaagtgaatacaacatattacccacttcaccacatgtcttaactttatccatttgctctggtgttaaatgggccttatttccaatttcaagtggagcaaccttaactagcaatccactatgaaaaactacctgcgctgcttccggatctcccgcaatattatattccgcaaatgggctatgatttccgtgaccaatattaccacccataattacaatttccgcaatattttctttaacttcaggatattgcttaaaaagtaaggcaaagtcagttaatggtccaatgcccatcagagttattttttctggactacttttaatttccttagccatcaacgttgcagcaagaccaggttcaattaaagaatcatcagcttgttcaaattcaaagccggcaatccctgttttaccatgaaccgaagcagcactaatcattggtgccaccagtggttgattagcacccactacgacaggaaccttagtatgcaaaaacttttctaaatttaaggtattttgcaaggtatatttcagtgccacgttaccccaagtaggcacaatcatgcgcacatcaagttcttgtgcaaaaagactaatcgtcatggcagcaatgtcatcaatgccaggatcagtactgataattaaaggtttcttgttcataaaattatcctctcgtattaagtacttttataatagcaaaaaaccaaccaattaagaaagtggttggttttattctaataattatttttcttttttgggtttaatacgttgaatgtgttcttcttcatggtcacctaatactaatggcacacgctcaaccacagtatcggcatactccagtccgaaccaagatgcagggttagaagataaattctgcagccatactcttgcttcaaccatgaacttttcatagcctgtcaatttagttaatggactaattacgtcgttaacaattacaaaggcgaagtcccctacatcacgacccggtgtagtagtgaattgttgtggttgagcttcaatcgttccatcagcgatcaaatcatgaacaatttgccgcaaataaacatttacactggtttgttttctaaaacctaaatacaactgaacgttaattacattcttagtaccataagtattgaccgcgtattctgcagtatatggctcgttagtaacattaacagttacaaaccagtaagccttagcccgtttaggtctcttatccaaaattgaataaagcatttcgcgcttaatgaatttattatacttaaccttagccatataaactacattcgtagcgtaaactggataatcatcacagtggctcaactcagtcaacatatctgtatattcatctaagcgaacataagcattctgctcctcacgcttatcacggatcttattgccatagaaccacacgtacatgattgccaaaataaaaccagcaattaaaacagtgacgtaaccgccatgcaaaaacttagttaagcttgagaataagaacatcccttcaataaaggcaaagactactaagaaaatgcatcgtattgatagcgcggtaccttttttacccagatattcaaataataaaatagttgtcatcaacatggtaaccgtgatggccagaccatatgctgcttccatatgatgtgaagttctaaataagaaaacaattgcaactgtaatgacacagatcatcttattaattgaaggaatataaatctgtcccttctcatttgaaggatagataatattcattcttggtaaaaattttaaactacttgcttcagctactaaagtgaatgaacccgtaatcaaagcctgagaagcaataatagcggcaatcgtagccaaagcaatagcaaacaatcttagactacttggtactgcttcaaaaaatggattgaaatcaccattaccagcatgataattagcattttgtaaaatccagacgccttgccctaaatagtttaaaatcaagcaaacaaacacataaggccaagagcccataatattacttttcccgacatgtccgacatctgaataaagagcctcagcaccagtagttgccaagaaaattgaacctaaaatcaaaatacccactttattagcaggactaaataaaatacgcaaagcatgaattggattaattgcatcaagcaaactccaatcatggcttaagttcataagtccaatgagccctaaaaaagtaaaccacaggagcatgattggaccaaaggccttaccaatcacactcgttcccattctttgaattgaaaatagtaaaaccaggataacaatagtaatcaagataaccatatcttgcgacgaaactggaattacatcaccaaagcgcatatttttcaatccttcaattgaagttgtaacagtcacagctggagttaatgtcccatcagctaacaatgctgctccaccaattaaagctgggataactagccatttagccctctttctaaccaatgcataaagagagaagatccctccttcaccatgattagtcgccttcaaggcaattatcacatatttgaccgttgtcaataatgtaacagtccaaaaaatcaacgaaatagagccaacaattagttcacggttaacattactaatcccaccattttcagtcacaatcgacttcataacatacaaaggactagtaccaatatcaccatagacaataccgatagcaattaaaaggccagtaaaagacaccttttgcttaccagatattttattcataagtttttatcctctatttcacttaaaaattgaaatttttactagtatagaaaaagtctcgattttttgcaataaaaatatatctttttgaaaaataaaaaagaagatgaaatctccttcagtcacttaatttactttttcttatcttcgatggtgccatcactatgagcaataattacttcgtcacacatatccaggaacaagccatgttcaactacgccaacagtatgatcaaggtaatcagctaaaccatgaggtgctggaacaggatctgcagccaaatcaataatataatttccatagtgagtcacataacgttgattgccatccatacgccaccgaggctttaatccttcttgttcaaaacgtttaaagttttgttcacaagaaattggtaaaacttcaactggtaatgggaagccgcttaaacgatgcactaattttgattcatcaacgatccaaatgatcttcttagaattgattgctacatttttttctaaagttaatgcaccaccgccgcctttgattccatccaagttatcggcaacccgatcagcaccatctacagttaaatcagcttgatcaatatcggccaattcactaactttaaagcctaagccctcaagttgttttttactacggttactagtagttacgatagccttcagttttaagccgtcttcatctttgcgcttacctaaagcatcaatgaaaaaggcaacggttgaacctgtaccaacgcccaataccatacctgatttaaccatggcggctgctttttctgctgcttcttttttcaaacgatcttgttcttgcttgttcattattcatcatcctccatcgcctgtttaacttcctgttcagttggaattgaaggctgagcacctaaacgttgtacggcaattgaagatgcacgacttgcaattttagctgcttcttcaaagttagataggtcagaattcaaattgcttaccaaatatccaataaaggtatctcctgcaccagtagtatcggctgcttcaactttataagttggtattaattcttcaacatcgggagttgaaatatacgcacccttatcaccataggtaataaccacgttttttacaccaagcatgtgtagtttttctgcattagtggccagcgttgaattatctttaattgcaattccagtgatcttggcactttcagtttcattcggtgtaatgatatcagtatattgcagtaattctttaggaatctcatcaactgcaggagctggatttaaaatagtgatttttttggcctttttagcaatcttaaatgcttcaagcgtcacatctagtgggatttcgaattgcgcaattacacaatcccaactcttaatcaaatcaccagctgcacggatatcttccactgtcagttcataatttgcgccgtgatcaataatgatgtcattttgcccagcttcattcaacgtgatataagcatggcctgtctttgctcccattgtggtttgcacataagttgtgtccacgccataactcttgagctgatgcgtgataaaatttccttcactatcttcacctacacggttaataaagtaagtttcagctccacttttagcagctgcaattgcctgattagcacccttaccgccaccagcagtagtaatgtctagcgcattaattgtttcaccaggcttaggaaagtcttttacatgtaatgttgtatcaacattacttgaaccaataactacaatcttcttcattatgagcatcctcttctaaaaatggatttattcaacctcaattataacaaaaaacgtattcaaaatattgaacacacatttttgaaatcttactgtaaaataccaccattaacgaagccttttaagcgctcagcttcccacttcaatgtatctgaatcgtcaacttgcgagatcttatacccaacgaaatatggtgaagcatagaatcgtggaataatcttgcaacaagtaccttgaccatcattaattggatagaaaaataagttataagaatcaacaccatgtgacaagactgaacgcacatattgtgtgcccttttgaatcaaatcggcccaagtatccaaattagtattatcatgtgtcaaaatatttacttcttggtagccttgaactggacgcgctgataagttcatttcaactgaacccgaacgcccgacttcaaatcctttaaagttatcagcgccaatatcgtgatagccatctttatgatataagcccacgatctgcatatgtggatgagttaaagaaccatcagacttgggaccaaaatttttataccaaagcacactctgataacggcctgaattattcattttttgaaaacacttcaagccaaacttcatcaactcttgattatcttcacgcgtataagttgaaatatctccctggtgatcacttgattcaattaaaattgtttgattagtatcctttaacgtagggtacttattcttcaaccaaatcttatcgccatctttttcataaatattaactagatgctgcacatcacaaaaaggacagccagcattctgatttccttgccgattaccataatcataatcatatggcttacgcttaccaattgaatattcatacactaaaggatttttgtccatatttttcacctgctaaaccaaagatatcatacatttaacatcattttaacaattttatcggttaattgtgaacgtttttattaataaagctaggaatagtacgtctatctatgataaactacctttgtaaaagaaatacatgatatacatgagaggaagaatcatgaaattctataaaaaattggtacttactggtgccgcagctttagctgttctaggcttgagtgcatgttcaaataataattctagttcatcttcatctaataagaagattccaactaagattaacaagaagactaccgttaccttttggtattcactaactggtaatgcgcaaagcagtttgcaaaaattgactaaagattttgaaaagaaaaatcctaacattactatcaagttgcaaagccaaggtggcaactactctgatttacaatctaagttggtttcaggtttgcaatcgccaaaggatttaccgacaattactcaagcttatcctggctggctttacaatgctgccaagaacaatatgcttgttaacctaaccccatacattaacaattctgaaattggctggggctcatatgctaagagtggcattaagaaagctctttgggatggtgcaaacatcaacggtacacaatatggtgttcctttcaacaagtcagttgaagtacttttctacaataagaccttacttaagtatgatgttaaagtcccaactaacatgagtgaattggcttctgcatccgcaaaaatttaccgtgaaagtcaccacaaagtacgcggtgttggatttgatgctttaaacaattactacatgatgcaaatgaaggaaacttacggcaaagacttcaataagaacttaaactttgctgccaaggattccgttaaagccatcaactactacgctaatggagtaagagccggctacttcatgcaagctggtactgaaaaatacatgtctaccccattcaacaatggccgcgtagctatgttcatcggttcaactgctaatgaagcttaccttaagcaaggacttaagaagggctacacttacggcgtagctgctcgtccaagtacaatgaatgtccaacaaggtactgatatctacatgttcaaaaaagcaaccgcaatgcaaaagtcagctgcgtttaagtaccttaagttcttaacttctaagtcatcacaactttactgggctaaacaaacaggctacatgccagttaatactgctgctatcaacgacaaggtttaccaatctgccaagaacagcaagataccagcaattattgccaagacctctaagaacctttacttcttaccagtaactaagaatgctactgccgcatatgatcaagttaatgctaacatgcaaaccattttagctaaggcaagtaaaaagcaatcatggaatagcgatatcaagactggtaaagataagcttgatgctgcttggaagcaataatttttcaaataaaatatctatcaaaaagtgtctgggaaaaaactaacccttagatactgaaagacgatcaatccaactcttaatttgagttgcttgaccgtctttttctgtctatttttatttttgaacaaagaaaattggtcttttgaccatcttctgttccaatatttgcttaaattcatcatcatgaaggctattcctatatctgtttcaaccttctttttgcctcttaaatgagttcggcgcatgccaaagacgttcttcaaatgtccaaaaatcggctccacatcatattttctcatgctgtagatgtgtctgccttcaggactttggagaactgctttggctttttcttttaggtattgccagttaggattatagcgaacctgacgttggcgtccgctcttagtcttggctaagcgttctaattctggcgttagttgaaattcatctgcttcatagaccttaaaatcacgaacctgaccagtcgatcgatctttacgttgactataatatttgaagttgaatctgacgccattttgatcaaggtaataatcatctttttcatcatagaaccagttagccagcttagttggatcgttgcgatactttctggtcttttccttttcgtacatggtataaggaatatagtacttcttgtctgaatactcttcttctaacattgaataattatattcgctgccataaccagcatcagcgacaatcttgtcaaacttgtctagtgtcgtcatctgctttaaaaatggttcgaaagttctgaaatcagttggattagggtataaagcaaagtcaaccacatattgatcagtggtggcggcttgaatattgtagcctggcttgagctggccgttcttcatgtgatcttccttcatatgcatgaaagtcgcgtcatgatctgtcttagaatagctgttacgccctgcaaagatttctttcgcctcttcatatttcttcattcgaggaacatagtcttttcttagtttatgaagcagctttttaagaccgcgtcttcttgcttttctaggcgaaccgccagggattgctttgggttcttgctcaatttcttcggtcagcttttcaatctcggcttccgtttcttgtgctagctctgccaaaccttgactggtctggactttctcttttgccattgctttgacgacttctttggcaatcaattcatcataaagctcaaccgcttgacctttgagcttgtcatgaaatttttcaactgccttgcgccaaacaaaagtatagcgattggcgtcagcttcgattttagtgccatcaataaagatcgctccttcattgataaggccctcggcttctaacaaattggtaaagtagaggaagcttttcttaaccagctcattggcatgcttgctggatctaaagttattgatagtatggtaagaaatctgttggtgttcagccaaagccatcatcggcacgttttcttccagcattaattcgatttttctgcctgaaaatactcttctggaataagcaaaaagcaagattttaagcatcatcgctggatgataagctggacgaccggttttagcagtattacccaataagacatcttctggaattgaatcgacaaaccagctaatggtattagccaaatgattatgaggaatagcgaagtctaagttgagtgttaaagctgtttgacctatggtataattttgatacattaagattgccttctttctttttgttttgtggtgattcaataatatcaaggaaggcacttaaagtatagaaaaagaacgatgaaatccattaggaaatcatcgttcttttttcctgtctgagaattagttttttcccagacacttttttacctaattatttactaaaaatggatattgaatttgatcattatcagttacattcaacttgtaacgagcacgatataaagccttttctaccgctaattgccctgcagttgtggccattgcaatcgaatatgacttgtgtggtgaattgatcaggatttgactgatagaatgcttaatgtatgactggattagaatgacataattcgattccttacatgcacgtaaaacattagaagcctgtttcatctcgataattcgagctactccattgtgtgcttcaatcaccttagccaagttagaggttaagctcttgtctcctactacaacggtaactcgttttttatcgaggtcaaaatcaattcgggaagcatagtcttcattttgcttttcagacgactgcttctcctttttttctaattgatgcaataaagacttgtgtctacctttagtcttgtgcttttccgtttctttatttttatccggcttttccttcttttctggaatagtaacttcagcttcggcataacgccatctaaccctaatgaaggatggatcactgactcgccaaacaatactaatcaggtcattttcgtgtaagttaaagtgacttacagtattcatgtctaagtataaaatagctttttcaggatttacttgacttaggtttttgccattagagtcctgcttgatgtataaaccaaaagaatcacggtgaactaccgctggaccaaattcgataatttcctcatctggcgcaaaagactttgcatgatgctcaactttaataattggacgattgccactgtcatttaagtgatctagcaaagtaactgtatcaccgttttccagcttttcaattctagtcaagtgttcattaaaatattgtactgaatgaccattctcatccactgcttctgcacctagcagcttacgtctaatctcatattgtttttcctttggtttagccacaggaattattttcttaaccacaggcttaggaataggagttatggtcgcatatttgtttttattctttaaaaccgtaggactcagagctttagcagcttcttcttttttagctttttctttttcaagctcttccttcgtttttttcggctttattttttctacagtattttcatcattttcttttttagtttctatttcagttttattttctagcttattctcagtttttatttctggctcattttttacagtctgatcagctttttccgcaattttaacgacttcattcttattctcaggtgaattgcctagtactgcctggttatatattttactaataattttcaacgcaatcattgactgcttcagtgattggggatcgctccccgtcgcctgcattaaatcaataatatcttttctataatcaatcgtcatatatttaccttctcgtattatataaattgtaattagtcatattgtgataattaatcaaattagtatttgctttttgatcttcacatgttagcctctaattgtcattggctttggtcaactggtctaggttatcacctcctgcagttttgtctgctttataagtctgccacccagacagttcctttatgctctaactcacatgctgtattgattgcttctttttgctagtccttgagcaattgggattaggtgcagctttcaaagaagcaaccagtgaatacttatactggcgagattgaacttaagaactgtaattaggggttaacatgtgaagatcaaaatctatgatcagaaatttgaaagaaaggaggccatttccaatgaaattatttgtcggtattgatgttagttctaaagatttacaggtcgttgcacttgattcagaagatcaaaacaaacgcttaattaacgatagctttgtcaatgatctttatggtgctagtgaactgaaaaaacaaattttagatctagctcaaaataaacactatgatcaaatcattattggcatggaagctacatctatttacagttttcatcctgcttactttttccaaaatgacgaagatttacaaaagctcaatgtagagactgatgtaattaaccccaaagaaaccagcaggtttcataaagtctttgaagaaagtaaaactgatcctctcgatgcttattacattgctttgtatctaagctttggacattatcgagtaagcattgccagacaagacaactatcttgctttagagcgtttaacgcgtaccagatatgaattagttcaagaactgactcgtaccaaacagcacttcattgaagctttatattatcgggttaataaactaatcactgtcgataaagataagattaatactcctcttttcggtgctacaatgatgtctattgtaaccgatagtaaaactctggatgagatcgcggatatgcctaccgaagacttaatttcttacttacaggttaaaagcagaggacgcttttccgatccagataccttggctaaagcaattaagaaagctgttagaggttcatatcgcttaggcaaagtaatgactgattcaattgatgcagtgctttctgttcattacaacatgattcaaagctttaatgaatctattaaagatctagaaaaagcaattgatcgtatcgttgatgcattaccagaaagcaaaattctggaatcaattcccggtattggcaaaacctatacagctggtattatcgctgagatcggaagtatcgatcgctttgataaagaagaacagctggctaagtatgccggcctaacctggaatcaatatcaatcgggagatcacagcaacgaacatactccaatggccaggactggaaacagatatctaagatattacttgattgaagctgccaatctagcaagattacatgatcctgttttcaaaaaatattaccaaaagaagtatgatgaagctgtctactcgccgcataaacgtgcttgcacattaactgcaagaaaattagtacgagttatctttaaattgctcaaagatgacaaactgtacaggacaccgaggtcttaatttcaaaaattggtctaaatttaaaagtaaacaaaagtttaacattaaaaaaatcaacctttaccaaggcttagtttcatatactcaaatttatgatcaaaaagaacaaatatcatcgcctttcatttgacttattaccacatgacttatttcttaaatatgaatattatacaaaagtttttaatgctaatctaattcttgagactgtaaaatagtttgtgtaaggatgaatgattccttaaatttatttctttaaacattagaaaaaggagttcctttctcgtatgattggtttgaacaaaaaaacacatacagaaagaagaactccttcatgaatgattttaccaaagattttgctcaagctctattcaatccagacaaaataaatgatttattgcgcaaagagctacaacaggctgttaataacttgttagaagctgaattgactgcctttctgggctatgatccctatgccagaaatggctggaatactggcaactctagaaatggtgcttatttccgcaaagttgatacgcaatttggcccaattgaagtgcaagtgcctcgggatcgcaacggtcaatttcatcagcacacgctgcctggctacaagcagcactcggatatcttggaaagcatgattatcaagctttactccaagggcgtgaccaccagggaaatagccgatctaattgaaaagatgtatggcagccattacagtccagcccaagtatcaaatatttccaagcagatgattccaaaggttgaggcttaccacaaacgcaagctaagcgacaagtttttctgcgtctatttggatgcgacataccttcctttgcgccgagaaacatttgagcgtgaagcagtctatattgccattggcatcaagcctaatgggcacaaggaggtcattgactactgcattgcacctagcgagaacattgaagtctggacagatatgcttcaaaacatgaaatcccgaggcttaaagcaagttgagctttttctttctgatggtgttgttggcatgaaaacagccttggccaggacttatcctaaagctcattttcaacgctgtttggttcatgtcatgcgcaatatctgcgctaaagtacgcgtcgacgatcgtgaaaagatcatgaacgaattcaaacaggtgcatcaacagacaaacaaagaagaagccacagctgtcctgcatgacttctataccaaatggggcaaggtttacagccatgttatcagaagcttgaaagacatagaaccagatctgctggtcttttataactatcccaagcagatcagagcttcaatttattcgactaacatgattgaatcatttaacaatgtgatcaagcgcaaagctaagcctaaggcagagtttccaactgaacagtcgcttgatgcttttattggcattcaggcaatgagctacaatgaccgttatttcaatcgaattcataaaggctttggtcaggttcaggacaccttagaatcctactttgattaaataaataattaaaaaatcaatttacgagaaagatctatttacacaaaagatttgacagtttctaattctttatagatttttatattatttttcctgtaaaaccattataataaaagtagttaaaatatcatttattaaatggggggagactactatgaaaaagaaacttttacttttcgtatcctttttagccggtttattgttcttggtatctacaccaacttatgctagcaagcttcctaaaggctatggtattgctaaaacctttaccacaccaaaagcaacccgtggcacctggtattatcgcgaaaagggtgataaaacaatttctaaggtaaagatcactgctcatagcgtagatggtaaaaagctttacgtaccttcacaaaagttcttcgagaaaaatgtttacaacgtttcagctaagaagcgtaatcagttcatcaaaaaaactgaaaatatttatgctgcagctaactataaaaagggcttcaatgtcaacaattgggttaacttagctggtgatggtgagtactacatccctgttactagaactgttaacggcaaaaaggttaaggcattaagaatagctactggtgctggtccttatactgctgcatatgcatacaaaactaagacattggttaaataatcattgtctaacgaaaaagcaaattagcataatttgctttttttctacccaaagtcaagtattatcaatgatttaagaaaataaatttacttgttttaatgatgcgaataaggttaaagcaaataagagtttaaatttaagaaaaagcgaaagtaccacaaataagcctactaagtgtataattttttacggtaagttgaataaataattaaaaaagcccaagtcctttgaatttggacttgagctcaaacaaaaagaccagtagtctgatgttaagaacaaaaaacacattagaagctggtcttttatgaattcaattgtaactgaaatcgcaaatattataaagtctgaagataattatattaagcgtgaaagaaaaataatctgtttcttcttaaacctgattaaggaaatcatggccttggctttagctaaagttgatgatgaaatgattaccaaggttaaagcacagggctatcagattgataagaagaatgagcgctcaatcaatatggcttttggcgaagttaggtatgtcagaagaagatatgtctgcccaggcaaacaagcaaggtatcccttggatgaattaatgggctttgacaaatacaagcgctacagtattttagcagtcaaaaacatcttagaagtaagcagcgttgccacttatcgcaatactgctctagcagtcaattgcctgtctggctttaatattagccatatgcaggtgggcaatttggtaaaaatggccgggaaaaatattaaagcgggccaagaagcagattcaagatatgatgccgcaggcactaagaaaaaggtcccagttttgtatcttgaaggcgatggcgtggtgatcaaaggcactaaaagccggttggaatttcatcgctatcaggtctgtgaaggcattgtcaatataagcaagaaacgcagaaagcgaatcaatgccaaggaatttgtttctttaagccgacttgatgcgctgaacgaagccaaggagtacctggccaatacttatgatctttctgatactgtaattcttagcaacgccgatggcggtgctggatatgccaaaacagacttcgatgacattgtagggctatgcaagcgtcatgagcatttcttggatgtctttcacctaaataagaaaatcaaagaaaggctatattttgcgcctgacctgcaaggcaagctgatttctgctttggaatacaaatacagctatgacaaagttaaaactatcctaaccactgcagaaagccgactaattgatgaattgaataccgagctcaatcatgattatctggggcgcctaaggaattatattgatcgtcattgggacgatattaagccgtttaagaaacgaaaactgactgtgactaaagccattggctgctgcgagagcaaccaccgcaagtatacctaccgtgttaaggggcaaggcaagaaatggtcaaaatctggagcagaaggcatgcttaggatcttaagctgcatcaagaatcgagagctggaattttggcttagcagcgagtttgaagattcagaaataactgtattgactgaacaggaattaaaagcagcggcccgtgacagcttaaagaagcgtcatgaagttcatttaggcatccagcatggcgcattaaccgcacaggtagctggcaatagttatttaagcaagctaagcagaaatttaagtcatataaatatttaagaaattaaggttagactaatggtttaaaggctaccgcaaaaacattgacacttacataagcctatgaatacttgtagtttttccataggttgcttatacttaagttgattatttgatttcagctaaagtcttttattttcggtggctatgttgtaatcatataattgatcatgtttgataagagcaaacattgtgcgtatcagtttatggactgatgcaatggcgattttcttatagccttgtctatttgaagatcgttttttcttgtcataataatcagttatatggcaaggctgcgtagcctttaccgtctccatttgagtaataactcgataaagtatttttctggcaatatgattgccatgcttggtaatgccaagagaactgtctttttcaccagattggtaccttcctggatcaatgccaacaaacgcatcaatttgagctgaagtgctaaaccgtcttagatcaccgagctctgctactaatctcactgctgtaattctagcaacccctgggatactcaaatagatggataaagcacgagcgtttactgctttagccagcttttccatgtagttaattacatagtcgcgttcttgctggagtgaaaataaattagaaatgttcctttgaatagctctaacgataatactatctttggaatcataaggataagcttctctagcaaaagcgtataatcttgtggttaagtaccgtgccctttgttgtcctattccagaaatagaattaagcatttgagttacctgtgtctcattcttttctagaacatatccagcatgtgggaaaagactaacaagcgcccaataaattctgccagatggatgagacagtatttcttcaatttgtgggaaagtggattggaggttgcggtgcaattgatttttagtagtaactatactcctagtaagttcttcataatagcgactggcattctgaagttcatgatactctctgggctgtggatcacgcagcttttgcggggcattaaattgaattaaagccaggcgataagcatctaccttatcagttttattatggcgtaaattattgtccattagctttttcgctttaagcggattaagcttcaaatacttaatatgataatcctctaagaaagcttgcaggcttagagaataaacaccagtagcttcgaaaacaactaaaggagttatcaaatattggttcagttgctcataaagtttttgatagccaaaggaatcattagagattctaaaagattcgccttgtttgatccggtcattaaccacacaaactgtggaagatttactgctaacatcaataccgaaaataatttgtgattccataatataacctccgctgtgaagataaacctctttatcaacctattaattctaattttctaaacacggcatctaagtgcccacagacttcgaagagacttaagaataggtggtaaagcagtccgtttcttttacgacatcaagtgtctaaaaagctgaagacttgatttgctttatcttcactttctattttagacaaaataaaaagtgccagatcgtgaatccgtcgattcatgatccaacactaggttagtatgtttcttttaccgatttttacttttccgtatttctccttcaaaaagagcggtcaattttgccaaactcttatgatcaggatagcgttgaactaattgctcaattttatcggtagctaatttttttacttcttcggctgagcccattttctctaaaaaatctgccaaatcacctgaacgagcaagtaacttacgctcactacgactttctgccagaaaagcttgatcaaccttacgtaacttcaaactaccatctgcattaaagtgatatcctccccacatatgctgcttaattggttgcatcggttcgctatccacataacacaatttccctaccatatggtgcgtctcagtaattcctaacgtaaccgggtcataaatatcgacatagttaaaaattttctcccgcattttagccacctgacgtcgttcagctggcgtcagtaaaagccaaatattggttccttcatacagataagcagctgcaattgcttctggatgacgacaattagctaaagcaaactgagcattaattgaacctaacgaatgaccataaatataaattctactacctttaaattgattaattgtctgattcaataagtgagcagctgattttaattggctaggaatcgtccgttttcgtgcaagcagtgcttttaaaattggtagattagttttaatccattcatcacgccaagtttgtggagtcccctttttaaaaccatatgatcctttaaataagattgttatttcattcggacttgaaatgacgaaggctcgcatcccatccttagcataaacattacgacaaacagttccaagataatgttgatctattttgatagtatcacccagctgcaattcatcatatgcctttttagttaattcaactcgttcacgatctgttaactgtgcatttacactcataattttccctaaaataaaaaactaactcttactattatgttagcatgagttagtttttttggataatttgagcctttaatcatattttttctgcaagtaatttgcaatcgttgacaagcagaaacagacaataaagtacatgattgcaataatcacatacattggaattaagtaagtcgtgttctgactgtaaataatttgtgcgtggtataaaagctctggcaaaacaatgatagttgccaatgaagtatccttaaccaatgatacaaattgtgataataatgccgaaatcatattgtgcaaagcttgtggcataattacatgatacatagcctgaccatacgacatcccgttggaacgggcaccttccatttgacccgaatcaactgagccaattcctgaacgaacaatttctgctagcattgcaccttcaaagatgactaacgctgcaattgaagctgtcgttggattcgttacaatacctaattgaggtaaaccaaaataggtaaagaagatgatcaacaatagcggcaaatttcgaataatatcaataataaagcctacaattgcagacacatacttaattttcatgtagcgaactaatcctaagattaatcctactacgaagcttaatgcaattgaaattaatgaaacataaatcgttacccaaagtccttgtaataagaagcggatatcgacccatgaatatgcatgaataaaagtttccattctctatccctttcctattagttgactaattttttctctaaatgacgcatgtagtaactaagcggcaaagtcaagatcaagtagaacaatccaacaataatataagtatcaattgtttggaacgttgagaacgcaatcaattgtgcttgatacatcaagtcaaaaccggcaacaaaggccaaaactgaagagtttttaaccaagttgacaaactggttgcctagtggtggaatcactatcttcatcgcttgaggtaagatgacataacgcatggcttgcacataggtcataccgttggagcgagcaccttccatttgaccagttccaattgaattaattcccgcacgaacggtctctgcaataaacgctgatgtataaagcgttaaaccaattgtccccgcttgaaatcctgacaatttcacaatataacgtggaacgatcaaataaaagatcatgacaattaccagcaaaggtatatttctaaaaatcgcaatatagatcttcgcgatcacttggccaaatttagatggtgctacctcaagcaaggcaaaaatcacgcctaaaatcaaactgaaaactagagcaataatactacttaaaatagtattccaaaaacctgttaggaagctgccccagttgttagtaataatttgccacattatttcaaaaccccctttagactaaaaccaggaattccagcaaaccactttttaatcaaacggtcataagtaccattcttttgtaattcattcaaagcttggtcgatatgatcagccatttgtttttgtcccttattaacagcaattccgtaaggagcattactatagacgccgccgactaacttataaccaggattttcttgagcgataccggcaagcaaaccgttgtcagtagttaatgccacaccttggttagcctttaatgcagacattgcttgaccatagtcatcatattgcaaaatccgcgctttaggggcatacttatgtacatcatcaactgcggtagttcctttaacggccaaaacagttttgccttccagatccttaacattcttgatcttactattattaggcactaacaaagatgaaccggctggaaagtatggcttagagaaggttacttgcttggcacgttctggtgtaatagtcattgtggctaaaacagcatcaacatttccattttttaaaagtgggattctagtgttggcagtagtagtaacaaaatcggttttagcatctttacctagcatttgcttagttaaagccttagccaaatcgatttcaaacccttcaatatgtcctgtcttaatgttcgttaagccaaacaatctagtatctgctctaacgccccaaacaattgtcttactttcttttaccttttgataaacattattgctagcatgcttgccacaagctgttaaggtaaacgctaatagaatcagcaaaggcaagaaaagaaatttttttatctttttcatggcgtgtcaccttaatctttagaaataactttgcttaaaaattgccgagcacgttcagtatctggatgagcaaagaattcttctggcttgcgatcttctaaaatatgaccattatcaaagaaaattaagcgattgcttacttctctagcaaaacccatctcgtgggtaaccacaaccatagtaatgccttgttcagcaacatatctcataacttctaaaacatcttcaatcatttctgggtcaagggcactagttggttcatcaaataaaatcaccttagggtgcattgctaatgatctagcaatcgctactctttgtttttgtccaccagataattgacgaggataagagtcaattttatcggccatacctactttttcaagatattgcatcgctactttacggttctcatcatcaggacgctttagcacaatcttaggcgccagcataacgttctctaacacagtgtgattattgtagagattaaagtgttggaataccatcccaacatttttacgaatcttattaatatcggtctttttatcagccaaatcatacccagttacaattaattgaccgctattaattggttccaagccattcatagttctaattaaagtactcttacctgaaccagatggaccaataattgaaaccacttggccttcatcaatctttaagttaatatctttcaatgcatggagctttccgtagtacttatcaacatgcttaaattcaataattgctgtcatggcttctacctttctttcctttgtctacacaatataattattttactcttcttaaagctaaaactaaatattttagcaattcaaaatagtataatagcctgctaatcttataaatttattcggttttagcaaaatatatttgtatttagctagattaaaataatcatattaacgctacttacgaatttattaactactaacttttaggataaagaaaaagtccctcatccctaaactgggacgaaagacttctttccgcggtaccacccacattgcctattagatatagacctactcatgaagcactatcatgcttcaccggtgtggtaacgtaccggagacgtctcaacctactctaagaattgttatttcggtgagctgctaaaagtgtttttcaatagttcagggtctattggcttttcactagcaccaactcactgttagaaataaactatctacttgtctttttcatagccttttaatttatttatatgtatttaaccttattttgggataaaaagcaagcaaaatttcttatacttcaaaatgaatccgtttttaatacaaataaatgctgttaatattcggaaaatagcttaaaatatttagtgatatattgaaaaacaaaggagtttgaaatgggaaaacttgaaaaacccattatcattggaattgccggtggttctggaagcggcaaaactaccatcgctcatgaaattgcggataatattaatgatcaagatcgcattatgatcatgacccaggattcttattataaagataatactggtgtatcaatggaagaaagaatgaaaattaattatgatcatcctgatgcttttgatatgccgctacttgaggcacaattaagtcagttaatgcacagaaaaccgattgaaatgccaacttatgattttaccgctcatactagaagcgatgaaactattcatgttgagccggccgatattattatcttagaaggaattttagtcctcttcaatgaagatattcgcaatttgatggatattaaagtttatgttgataccgatgatgatatccgttttattcgccgacttgagcgcgatatgaaggaacgtggtcgttcacttgactctgttattaatcaatatttgggtacagttaagccaatgtacaaccaatttattgaaccaaccaagcgctatgccgatatcatcgtacctgaaggtggggaaaatgatgttgcaattgacatgttaactactaagttacaatctgttttgaaataagcagcaaaagacctgataatcacaaagcgaagattatcaggtcttttctttattctaaattatcttaattttgattatcatcttgtgcattagctgtgtccaaaattcggttatacttcttggcaaagaagaccaaaagcaagacactagcaataacataaattaccgctgcaatgtaataggcatttgcataaccatcttgggtagtaaataagtaaaattcggtgaagagtccatcaatgacaccgacaacagcataagcaatctgaaccacaccggtaaaggctggacgcaagtccttatcaacaataaccatctgaacttcttgttgaattggcattgtggcattggctaatcctgttcttaagaagagcaaaagaccgacaattacaaacaaaactgtctcgctacctaagcgacgaccgttagctagcaacaacataactggcacacaggtcaatgtacctgcagcaacagaaacaatcgcccccatcttcttttccaagaatggcgcaaagaaatatccaattagcatcgctgcttgaacaaaggtgttaatggtagaagtaacatcacgtggaatgtgcaaataactattcaaataaatcggcacataaacagcaactaaacgagcaccaagttgaataccggcaatatagacaatccacatcaatgtcttcttgctcaaaagctttttatacatagccatcttctctgctctgctaggctccttgtcatctgcagtagaacgataatcacgtggcacatcatgaataaacaaagccaaaacaaaggctaacatggttacggcagccgtaatgtaaagcaggattctgtatgaatttgtataatctgctaaagtttgaccagttaacatctctgacttaccagaaagaacagatgcctcatgataaggaatgcctctaatcaaaccaaagaaccaaacgacagctttcccacctcaaaacgtacagatcgtttgtgtaatcaaattaacaatcattactgttgagaacatcttagttctaatttttcccggaacatatgaggtccacattaatggatacatcaaatcataaaccccaattgctgtccaagaaatagtataagcaatcatgataacgagctggttagtcgtgatacaagttaaagccataaaaatcgcagtcattggcggcaaaatcaataaaatcttgcgataaccccacttgtgaactgtagcgatcattactgacatcaaaatagcagttgccgcattaaaaatgtttaatccagaaatcaggtgtggcgctacaattttgtaataagatagagccgcatcattcgtaatcccagttactgcacccaaaatgccgtagatccataaataaataataacattatgtttgtaacgcggattccagttcttaattgcttctgcctcagcttccttttctgcattacttcgtcgagccatataaatcccctttttttgaaaacgtatacaatacatctaactttattctatcactcaaatggtattaataaagtgtgtgtatacgaaaaggtatggtttatagtttctaggcaactttaggttttaatgctttatcgaaaagattggtaatcaatttcactaggacaccatcaaacagtaatgatgaaatcatacttacaataaacatcaacatttgtacattaacctgataatgactccaaccaaacaaaaagtaacttggtataaaaccacctaaattggcaaagaaagcaccagtcaaaacgctcttccatgagaacttttcatagcgttcttttttagggaaaaagccgatctcgttcattgctccttgaattaacccctcaaaaatagtcaaggctccccactggccaccgatcgccatctcaaccgtggcagccagcaattcaccaatagttccagctcccttagttggtacaaaatacatcgctaaaggagcagccatataccataagccagtaaaaacgttgtcaacaaccggtgcataaccggtgggtaaaaagcttaattttactaagttatacacattgttaaagccataagtgtaaatcacacccatgatgatcccgattaaggcaactaaaataactgattttacattccattttgacgatctagtaaacataaaaaatgctccttactaacatactgtcagtaggagcacacaaataaaagttaattctcttgttagcactttcccttgcgcaagtattatcttgttcaggttcgaagggtattatctcagcattacgcacccctagtgacatttcatttatttatcaattaagtcaagtatagcacattgttaatcaaatgccatttgatctgtgtaaagtttgtaataaaatcccttttctttaagcagtgcctcgtggctgccttcttcgatcacattaccatcttttaacacaacaatcttattagaattcaagatcgtctttaaccggtgagcaatcacaaagcttgttcgtccagcaatcacagtatccattgccttttgaatcttttcttctgttaccgtatctacgttagaagttgcttcatccaagattaggaatggtggattcgttaaaattgtccgagcaattgacattaattgcttttgcccagttgaaaagattgagctagcatcgctaacttgagtatcgtaaccatcaggcaaagtctcaataaaatcatggatattagcctgcttagccgctgaaatcacttcatccattgaagcattcggcttaccataacgaatattgtccgctacagtaccagtaaataagacagagtcctgcaggacgatcccaacattatttcgcaatgatgttagttgaatatcacgtacatctgtcccgtcaaaggttactttacctgaattaacatcatagaagcgatttaacaggttcataatcgtagttttacctgaaccggttggtccgaccagagccactgattggcccttatcaaccgaaatatttactccgtgcaaaatttctttatctttattgtagccaaaatgaacattttctagcttgacaccatgattcaaaccactaatgaccttaccatttggcacttcgttttcatctttttgttcttcaactgtagctaatcttcttgccccagttaaagctaattgaatcatggaataaattgaagtaatttgtgtcaaaggttggaaataaacttgtgaatattcaacgaaagttacaatcaagcccaatccaatagcctgagaaatttgaccggaaataatcatccaagaccccatagcgatgacaattgccaaattaagtaagttcaatccgttcatcaatgggaataggattcccgaataaaattgccccttaaacaaaacggttcttactttattgttgtagaccttgaagccatcaaccgattcttgacgcaaaccattggtaataatcaccttttcaccattgatctgttcggtaatataaccatttaaatcgccaatttcatcttgctgcttatcgatataaacgcgagcttttttcattaaaaggacactaataatcaaaatgaatggtgttgtcgcaatcgtagtccaagccaaagtactattaatcgtgaacatcacaataattgttcccacgaacataattccctgggaaataatttcaaaaatcgcattgttcattgcgttgaaaatattatccaaatcggaagtaaatagcgataaaagtttaccatcctgatgagtatcaaagtagcgcactaacatccgttgaaacttggcaaatagattctcacgcatgtcattagttgaatccgcattgaacttggacattaccatccaagcaataaaaatcgctatctggctcaataagtaaaacaagaacatcgaccataacgcgctatagaacgtgttcatggatgctgtacccttttttaaatcaaccaaatagtagttaaagcggtaactgaacggcctaaatatgtaggtgccataacctgtgcaccactcgaaatcaaagaaaggataaccacaatagtgattcccttccaataaggcttcaaatacttagcaaaatagcgcaatgcctttttcgtattactcatttattcatttcctcctttcttacctttttgtgtcttgaagatttcttggtaaaccggcgaagtcttaagcaattcttcatgcgtaccttgtgccactaatttaccgtcatctaacactaaaattgtatcggcattaatcactgaaacaatcttttccgcaatgataaaagtagtagtatcaggcagctcatgctctaaagcttgctgtactttcttctcactttccgcatccagagcagaagttgaatcgtccaaaatcaaaattggtgctttagcaatcaagccacgtgcaatagatagacgttgcttttgcccaccggaaaagttagcagaacgctcctctacttcatgatcgaaagaatcgttataacgctcaataaattctgatgcttgcgccatattggcagcacgctgcaattcatgtaatttagcctgagcattaccttgacgcaaattagatgctattgtacctgagaaaagaactgctcgctgcagcacaaaagaaacagttttgcgtaatgcagcttcagttacatccttaatattttgaccgccaatttttacttcacccttagttggatcatataaacgagcaattaattgggccaaagttgatttaccagcacctgttgccccaacgataccaaccatttgacctggcttaatcttaaacgaaatatcctttaaagtaggatcatccccatcaggataagtaaaggaaacatgatcaaactctacgctaccgctaagaggtgcaaccgaaccactttccacaaacttgacatctggttcagtctccaatacctcacgaatacgtccaagagaaatattagctcttgaaaattgcattaaggtcattccggcaatcatgatcgtaaatagcagggttaaaacatagttcacgaatggactgactaccgcaatatcacttggatgtgccgtaatatttttaccaattaaataaacaattaaagcaattacggtataagcgatcatctgaaaagctggcataattgcagagaaccagtaaccaatcacaatgttgtagttattcaattggtccgaagtttgatcaaactttttaatttcttgtggaccttgattaaatgacttaaccactctcacaccttgcaatgtttcttgtgcttgattagaaattcggtccatcatttcttggaatttggcaaacaaactattcatttgtcttaaaacgtaagcgccaaaaccaaaaataattgcaaccatgaccactggtgcccaccagaagcgcggaataatcacgatacagaagataaatgaaccgacaattaaaatcggcaaacgcaacatctgcatgaatagctgcatcatcatgttcattacctggttcatatcgttgatcaaccgtgtagttagagaacctgctgaaaatttcttaatattaccaaaagagaacgtttgaatcttagcataggtatcttcacgtagatcactaactactccttgtgcaattttcgctgcaaaataaacgttaaaaatacccgaaataattgcaattatacctaggactactagccagattccatcagacaagactgcttgcttctgattcgccatcaatgccttttgaatgttttccaataatttaggctgatataatccagaaaacgctgaaaataagatagcaataattgcacaaacaacatcttttttataacgctttaagtatggaagaattattttaaagttttccatttttactcctttcttcacttaaaaaatgccaaaaagtagtgctccattcttctgaaagcttagctaacaatttcattttgtcagttcccatggcttgagccgttttttcctctaactcaaatagaggacgcaacctgtcataagcatatttccgccctgcttcggtaagctggcaaaatcgaactcgcttatcgctaggatcaacagtcatcgtgatatgatcatgatcacgcagaatcttaattcctttgttaatcgactgcttgggtaaatcactcagatttactaattctctttgtgtcaattttccccgaatcagtaattcatacatgattaccactaaatagtccggcaagtcatgatcctgctcccattggctataagcacggctgccatggataattgatagatttaatttttctgtctcactaattttcattacttcaccaccatatttagtctacatgcatgccaaatatattagtatgcacatggactattgtcaaatcattttgtcaaaaataagactataattaaagtaaagaaacaatttttgcatctaaatttcaaattggtataataaaaaaatcatcaagtaaaacaaggcagggattatatgcgtaaaaagtttttattaataatttcaatagtggtcctgtttgctttgccattaagtggctgtaagcaaaacaaaaagcaaaacgtttatcaagcagttaaaactagtaaaaccattaactggggcgtcaaagccgacacgccattattcggctcaataaatattaaaacaggcaaacttaatggctttgaaattgatttagctaatgcattaacccatgaaatgctaggcaaaaatgtcaaagccaatttcataacaacaacggccaacaccaagattcagcttctaaaaaacacgaatgtcgacgccgtcattgcagcaatgaccattacgcctgaacgtaaaaaacaagtcgaattcagtcacccttactttcctgctggacagtcaattatggttgctgacagtagcgccattaaaaatgctaaaaatttgaataacaagaaagtgcttgtagttaaaggaactactgccgccgatgctatccatcaagttgctcctaaagcggaaattttacaattcgatgattacggccaagcttttgccgcattaaaagctggacaaggagatgcctttgtaactgataacggaattttagctgggattttgcgtgatagttccggctataaattagttggcggcacctttaccaaccagccatatggtattgcagttaataaggggcaaaatgacatgctcaagcatatcaacactgcattagcaaaactagaaaagaatggcacatataatcacctagttaaaaaatggtttggcaacattcctggtatgaacattaaagaactagaaaagaaataagaaaaaggctaagatcaaaattttgatcctagccttttcgcttatttagcaatgaaatcaagtaaagtaaacattacatctttatttttctcaggcacaccatgattaataatctctgtaggcgtttgatgtaaatcattattttctaaagcatatgctccatcattaatagcaatctcacgcacattatcaatttgcggttcaaagtggaactgcaacccaattacattatctcccagtaaaaagccttgattcttaactagatcactagagaataataacttagcttcggttggaatttcactcatttgttcatgccaatgaagagctgttaacttatccggaattcctgtaatagtctgatcttgcaaataaactggtgcccaacctacttccttagcgggtgcatcaagtaccttatagcccaaagttttagcaatctgctggctaccaaaacaaattcccaagatcggcttgtgttgatctaacatttgtctaatcaacacacgttcatttttgacccaatcaagatcatcattaggactgtttggactgcctaggactactaatagatctgtttcatcaacagttggcaaaataccaaaattccctggatggtaaacgaacatttcgttatctctagcatggcaccaggcttgaatagaaccaggtccctcattaggtgcatgctgtaatacattaacgcgcatgaaatccctttctcactcaacaatatttttgtttttcattttatactcaattctagtggtaaacaagaagaattcagttaatcttttactgtatctttagaaactatatgtcaccttatatgatataatgttatacatatttttacatctggaggacttttatggacaatcaccttaaacgcagtattggcttaggttctgcactttcaattatcgttggaaccattatcggttctggaattttctttaaacaagcttcagttttagatagcgcaggctcaacctttatggcacttttagcatggattttagctgggattatcacattaaccgccggcttaacgattgcggaaatcggtgcccagatgccttatactggtggactttacgtctatattgaaaaaatttacggccgcgttttaggttttatggctggttggatgcaggctattgtgtacggtcctgctatgatagctgcagttaccggttttttaagtattatggtgactaatctctttggcatcggcaccgaatggcgtattcccattggtttgatcactatcatcgctatcggcggtttaaactttttagaaaataaagtcggtgcagcctttgctataatcactacaattgctaagatgatccctatttttgcaattatcttctgcggcatctgctggggtgagcaaaacgctgtcgcccaaactgtgactgagctgaatcgatcaacaggtggtcttggcgtagccgttctcgctgccctttttgcctatgacggttggatctttattgctaacttaggtggtgaaattaagaacccacaaaaattattacccaaagcaatcatcattggaatcactacagtattagtaatttacgcgttaattactattggtatttttagtttcatccctgccgataaaattcatgcattaggtaaaaattcaaccacttatttggctgacgctattcttggtccaattggcggtaaagttctatctgtcggcattattatctcaatgctaggcactctcaatggagaaatgctcacctttcctcgtattatttacgctatggctaagcgcggggatttgcctttctcaagatttttatcatacgttacacctaagggaaaagcaccagtcattgccactatgctcttaattaccttaactggaattatgatgactttcttcgatcctgattacctatcaaatctctgcgtcttcacaatttatagtttctatgttttagcattctttggcttattcattttaagatacaaaaataaggaccaacgtcctttcagcgtaccgttttatcccctaattcctttagtagcaattgcgggcgggctcttcgttttagtcagccaattcttcaatgatcccgctggcgttttgctttttactggaattaccgctgtcggctggccaattttctttttagttaaaaagatgagcaaagcacagaacacgattatcgaagactaaaaatctcaaatttttcttgttcatttttaataattatgatattctaattaaaattaatttaggagattcaattatgatttatcaagacaccacattggcatactcatctagctcaagttccaactgaacttgagtgattttggtgtacgtaaatcagcagccggattcactcaatcgtttctagacgataaggtgaatccggctatttttgtataaaggagaaaaaatggacaacaagcttaaacgcagtattggtttcggctcagctttttcaattgtaatcggaactatcatcggctctggtatcttttttaagcaggcttctgttcttgacagtgcaggttcaactacaatggccttactagcttggatttttggtggtctaattaccttggctgcaggtctcaccattgccgagataggggcgcaaatgccctacactggtggtctttatgtctacattgaaaatctctatggccgcattttaggctttatggctggttggatgcagatcatcgtgtacggtcctgcaattattgccgccgttgctggttttatgagcatcatgatgactaacttttttggtttgaatcattcatggcgcattcctttggctttaatcacagttttagcaattggaatcatgaatttcttcgaaaataaggtaggtgcaatcttttcggtcataaccacgattgccaaaatgattccgattgctgtaatcaccatttgtggaatctgttggggtcaacaagatgcgattaaccagactgtagcagaggttagtcaacacactagtaacttcggtgttgctgttttagccactttattcggctacgatggctggattttaatcgctaatttaggcggcgaaatgaaaaatccccaaaaattattacctcgagcaatcattgcaggaattacagctgttttggctatttataccctaattacaattgggattttccgcttcatccccgctaatcaaatttaccaactaggcgaaaacactactacttatctagctaacgcggttttcggtgcaatcggaggtaaaattctttccattggcatcatcatttcaatgatgggaacattaaatggaaaaatgctgacctttcctagaatcgtttatgccatggctaaacgaggagatttacctttttctaaatacttagcctatgttactcctaaaggaaaatctcccgttgttgctactttttttatcgtccttttagcccttttaatgatgattttctttgatccagaccacttatcagatctttgcgtctttacagtttattgcttctatcttttagccttctttggaatttttatcctaagaaaaaagaataaagcagagcgtcctttcagtactccactttatccttttgtgcctataattgctattttaggcggtttatttgtcttaatcagtgaattaattaatgatccagctggtgttttactttttgccggaattgtcattattggattaccaattttttacgccgttaagcgcatgaacaaacatcgtttgcattaaagcgacctttctacactgtagcttgctcgccacaactcttccattttagctaaacgatgccaatcccctttttgacacattgtatataaagcatgtgcaggatcataggcaattggattaccttctgtttccttcaaataagctccaacaatgttgattaacatcatccgaaagcgttcaatctcatttcggctaaagtaagtttcaaaatacttgctggttaagcaatcaaccgttgcttgcgaggccttatgcaaagaagccggattcttacgatagttatataaagtataggtcgaaattcctgttgccttacttaaactagtaatcttcacattgcgatcagttaccaatttttctgctctttgtacatcggttaaaattttcggatgcttaatgtgaggaggcatcggaatacgtttgcttaactctgcaattactttttcagcagcttccctcatttgctgagtggctactgtctcacttaccttgtcatcaagcaattctcctacaacgaaagtatgatcagtcacttcataccttctagtaattgcattgtaaaaatggccttcaacccctgtgatcttaactgcatcagttccagctttctcatagtcaaaaaagatgtgttgttgatcaccagttaatggtgaaaatggtaaattatctaacgtaaaaacttgtacatttaaagtataatctgaatgaacggaatcttctgcatcactacgatacattttcacttcccgatcatgaataaaatcttcaaaaataagattttttccatatttttttttcatttcttaatccccttttatatagtcctattatccattataatagagtagagggagttttataactcgcccctctcattgcaccggacgtacggttccgtatccggcgctacgtttgtgattatttacgagataaataatattctagcggatcgaccaagcctgggcgatccgctttgcttatgcccaatacttttgggctaagcagaaagttaatgacataacccgtacttcttttataccaacctaagcgcgtattagctactttatgaatatcttcatcactaaaattgcactttagtgccttgttaatccgcattaagttaatgtatattcgttttggtagtttccattgtttaatgattaccacccgtactttatgacgcagccattgactgaacttaattagaaaatatttcatgtcgccaactctaaagtaattgacccagcctctaactacttgatttatcttagtaaagactagtgatagaggctgagcagctgcttttctgcgacagagaagttctctcatcttgtcataaagcttgattttgcggtcatctcctggctttgcttgccagtattcgccacttttccagaaggtaaagccaagaaagttgctcttggttggtcgtacaactttggttttggttgcgttgacctttaggaatagctttctttctagccatgatgaaattgaattcatcacacgtttggctgatttaccgcttttgacaaagatattgcagtcatcggcatagcggacaaagcgcaggcctctttgttccaattctttatccattttatctaaatagatattggatagaattggtgaaagagggccgccttgtggtacacctagtttattaggcttaacccaaccatcttccattactccagctttaagaaaggctcgaattaaatggagggtggttttgtcatttacttgctctctaattattgaaattaatttatcatgatttaccgtgtcaaagtatttctcaatatccaggtcaacaacccattgatagccttcgtttaaatattccaagacttgttcaatagcgtcatgagcactgcgtccaggtctaaagccatagctatgctcactaaaatgaggatcatagatcttcattaatacttgggcaatagcctgctggattactcggtcaacaaccgtgggtattcctaaaggacgtttcttaccattagctttaggaatgtagactctgcgaacagcttgcggacgatacttcatcttcatgatggcgtcctttatttctacttgatgctttttaaaatagctatcaagctcatcaactgttctcctgtctacaccaggcgctcccttattgattttgactctcctgattgcttccttgagattattttgacttaaaatctgttcaattagttccatctcgtgatatctccatttctacttgtaaatttattcagaattgtcccaattgctttcaccatcaaagagttacgttctctttgtgctaggctatcctcttatccggactgtctgaacattgcttatagcgagatatgctcttacaaacattaggcccttcgctccagtttcattacaaaaccttcagcactactacgacctcagctgacttctcgcgattaacctttttcgaccaggcttacgatcgctgatattaaagcttactcggtttcacctgtccacgagatctctcggggtaagacattcatctttaattttccactgccccctggtttaccgtcttggttttacggttgtcctttggactttaacttgtgctgcagtctcatccaccatttggcctgaccaggtttctgtacgtaggctcggaaaactcgctagccacttccttcacccatagcgtcaccgctaacggcttgtggttcgctacacttggcgacaactacccgtgatctagactttcactagactagacaaatgccatgcccgacacacagcaaaaaactagcttttaaaagctagtttttgtttttattagaaaatattcggtttagggcaaataattaccagcagctaagtataaatcgtaccactcttgtctagtcaatcgaatcttggcacctttagcagaatccctaatgtgttgcggattcattgatccaactagcatttgaatatttgcaggatgacgtaaaatccaagctgcagcgatcgcatttttacctacctcatacttatcggccagtttttgcaactcttgattcaacttggggaagccatcattatcaatgaaagtcccttcaaacatgccatactggaatggtgaccaagcctgcacagtaactttgtgtagacgggcataatcaagaaattggctatcacgatcaactgatggtttatctaccatattcatatgcatcccaaagtcaatcattcctgtatgtttcaggctaaattgtaattgattgaacatcaagcgctggctcaagcaactttgtaacaatttaaattgagccgtatcaaaattagatacgccgaaaaagcgcaccttacctgctgcctgtagttgatcaaaagcctcagctacttcttctggatccatcaatgcatctggtcggtgaagtactaatgaatcaagataatctagttgcattctttccaaaatttcatcaacactatgcaaaatatgttctttagaaaaatcataacgttttcctggaacaattcctgttttagattgaataaacatctcttcacgcttgatctgcatttggctaaaagcttgaccaaaaatctcttctgattttccaccgccataaatatcagcagaatcaatgaagttgatcccagcatcataggcggtttgaattgccacttgagcctctggaactgatttttgattcattcgcataatgccaagtgccatcgctggaatgcttaaagtagtacatcccattttaattcgtttcataatgtaagtcctttcattctttatttacctcacatcatgaaccaaaaatagctaagtttcaaccacaagaaattcaataatcttttattaatatatcttagctactgccgattgaattgattctttatctaagaattcgtcataacttgtatcttggcgactaacaatacctttaggtccaacttcgataatgtgattagcaatagtttgaataaattcatgatcatgtgacgtgaataaaattgaacctggatatgaaacaagggcatcatttaatgcagtgattgactcaagatctaaatgattagtaggatcatccatgatcaatacattagccggttcaagcatcatacgcgacaattgacaacgaaccttttccccaccagagagtactttgatcttcttctcaatttcttctccactaaagagcattcgacccaagaacccacgcaagaatgtgttatcatcttgttccttagtagcatattgccgtagccaatctaagattgtaagttcatcattattaaagttagcgttcaaatcgcgtgacatgtagttaaaggccgttgtttgaccccatgtaacggtaccagtatctggcttaagcttaccagcaacgatatcaagcagcgcagtcgttgctaaagcgttacgtgataaaaatgctaccttatcaccaggacgaacaataaaggaaacattatctagaattttttcaccatcaactgaataagaaacattttctaccttaactaggtcattacctaaatcacggtgcatttcaaactttacaaatggatacttacgactagatggcttaatatcatctaaagtaatcttatcaagttgtttcttacgagaagttgcctgacgtgatttagatgcattagcagaaaagcgggcaataaattcttgcaattgcttcatcttttcttcttttttagcattttggttagcagctaattcattagctagtttgcttgattcataccaaaagtcatagttacccacataaagctgaatcttaccacgatcaacgtcacacatttcagtacatacttgatttaaaaagtgtcggtcgtgggaaacaacaatcacaatgttagggtaatcagccaaaaagtcttctaaccattcaacggtatgaacatccaaaccgttagtcggttcgtccaatagcaaaatatcaggattaccaaacaaagcttgggccaataagaccttaactttttcgctttcaggtaaatccttcatcatcatttgatgttcttcttcaggaatccctaatgattgcagcagcttagccgcatccgcttccgcattccaaccatcaagttctgcgaacttgctctctaattcagctgccttaaccccatcttcatcaccaaagtcaggtttggcataaagagcatctttttctttcattacttgatacagttccttgtgcccttgaattactgtgtccatgacagtgaagtcttcgaaagcaaagtggtcctggttcaagctggacatgcgctcattgggatcaattgaaattgaacctgttgttggttccagtttcccctctaacaatttaagaaaagttgacttaccggcaccattggcaccaattacgccgtagcagttgcctggagtaaattttaagttaacgtcttcatagagtgtgcggccaccaaatcgtaaactaacgtcggatactgtaatcaatctctttacctcgcttaaaatataaaattatgtttaagtatatcaaaaaagatggtcccttataatagagaatccatctttttaagcaatttattaaaactttttgaagctatctagcttttcctgggtaatatcacgaataattgcagtagctaaatcaactgaagccttaaagtccttataactactgaaacaatatggtgaatgttcatagcgcaccggaataccgatgacaattgttggcgcaccattttcgtagtaaattgcagcgccatcctgaccgccaccggttctaactgaacgagtatatggaatattatttttatcagctaaatcacatgcatattgttggaacttaggatttggtaaaaatgtcgtatccatatcgcgcaacattgggccacgttttagaccagtttgagaaagccagtcaggcgtaaaagtatcatcagctggacagctttcgagtaccagacaaagatctggcttaacttttctagccgttacataggcgccacgcaagccaacttcttcttggctagaaagtgcagccaccacgtcaaagttagtttcttcacccttcaaattatcaagcacatcaaccatcgcaccagcaccaaaacgatcatcaaagtctttaccgaagaataaaccggacttttcatgatattcgcatttaacatcaacaaagatagggcaacctgtatcaatcttgtagtccttgattgtctcctcacggctagaagaaccaacatcaattgacatatctgccacatcaggtacattattgcgctcagctgctgtcatgaagtgaggcggcttagttgctacaacgccagggatatattctccatcacgattgcgcactttaacgcgcaaggctggaatattatattttacccaaccaccaagtggaacaaacttaattaaaccattagggcgaacagcttgcgtaatgaagcctacagcatctgagtgcgcatcaagttgaattaccggtcgatttcccttattttctttcttggcggcataaacattgaacatcccatctacctcaatatctgccgttttttccgcataactagtaaacagcttaacgaattcttcctcaaagcccgaagtcgaattggcatctgagaattctttcaacatttggatttcttgttctttttgcataatttttcctttctataaaaaacgcttaatttaattttaccgagaaaaacagtcaaagtagactataattaaaaataattattgcaaaggaaaaataaaatatgaaaaataaattttcaatgataattcttttacccctgctttttagcctatcagcctgttccaaccgttctagtcgtcccgctacggttaagcagttctgcgacacataaagcatccaaacaggcaaatgagtttaagcctaatttaaaaaagaaatatcctggctctaagttaaccagcatccccgaacaatttcgcggtacctggtatcgtagcgatccactgagcaaatcagctcgcaaattaattatcaacaagcatacaattggtgactcagcagtttatcgacaagtggataagtccattaaactagatcataattctgagcaaaagaataaaacttattctggtggtgattccatgattgccatcgaacaacatcaagggcagacttggatgcgcgttcgtgagtttttaacaactgtagatattatttatattactggtcaatttaaaggacatcattgtttatatcttgcatattctttcggagatatccacaacgcacttttcaaaaacaaagcactagcaattaagtataaaaactatgacttttctaaaattaaatcatgaaagatattaacaatctactacaacaaaaaagtaacttactcttaaaaattagctcgttacccttaaacctattcccttatttagtattcagcttaattattaaacaaaatactgcaatcagcgtgctgccttttgcactcttctatgcctttcggcgcacaacattgtttttatttaaaggcggcgaaaatgaagataatgttattggctgggtcggtttattggcagctttattaggctatttcttagggattttcggcatctttttaccagccctttaccgcattagcgcatcccttgccggaataggcgccgcatgtttccctagcgttcaaaaacaaatcgccattcaaagcgactatcatccaagcaagaatgatctttttgcttattttggcgcaattttaattttactagcaatagttgtctttgttgaaccacatctgccaacaatttcatttatcgcaatgctcatttatacgctaattgctatactcggctttaaatattctccatttagagcacattcacgggaaattgtattgcagtggaaaaatgtctggttaactctaggtttgctactggctattctcttaattcgagaaggttggaactcgggaaaagacatcttctctatttttggcattatcgtttcagcagtagtcattattaactatctgatcaaattagctttaagccaaaaacatggtaaattatctcgcaaaatgcagtatcgcctgacaatcgcaggcctctgccaagactttaccactatcttttcagccgtttatatttctgttttatttggtgcaaaaaattactactggttatttgtcattatcttaatcgccagctttatcaaacgtccattattaaaaacgctacgtgaatatttaccatttgatgacttcaccattcaaagttggggcattgttctcggtctagttattacgctctttaggccaacatactttgcagggatttttttgattcgaattttctacagtttacaaaatactgacaccttagatcttatccgtgatcatgtcgatacaaatatttatatgatcaactatcgttttcgcactgctggaggcttcttaactcaattaattctgtggggtggcttgcttttattcaatggaccgcacatctttgagcaaatctttaactaccatattaataaaagcgttatgaattctagtcagcccttatttttaactcaattaatcttggtgctattcataatcagctttacaatttatactttaaaacttaacaaagggaataaaaatgaatgaaaaacctatttggaaaaagaatttacttgtcttatctattgcggtctttatcgctggtatcgccttctctgaagtaatgccgtttctgccattatatattgatacactaggcaattttacccataagcagttaaacttttggtctggctttatctactccggtacttattttgtatcggcgataatttctccctggtggggaaaactagcagacaaaaaaggcagaaagccgatgacattacgagcttcattgggaatggctatcgtccttggctgtatggggctagttaccaacgtttatcaattatttattttaagaatgttacaaggtatttttgcaggctttgtttctaattccaatgctctagttgcgactgaaactccgaaggaaaaatctggacaagcacttggcactatggcgtctagctttactgctggcaacttactcgggccatttattggtggagccttagcgtctattttctcctatcgcgttaccttctttattacaggtggtctattattaattgcatttcttttgtcattgttctttgtccatgaaacagacttcaagccagtaactgaaaagaaacttgataaagcaagcggagtaattaaagaattacgctcaccgcaattaatctttggcttgcttttaactactctaattattcaagctgcaaataattcgattaacccgatcgtttcactctatgttaaacaattgatggctaaccacggtaatgtcgtctttatttccggggtaatagctgctttgccaggaattgctacattccttgcggcatcgcgcttcggtgcactcggtgaccgcattggaactcataaaattattattgctggctttattggagccacaatcctcttctttttgactgcttttgtacaaaatactgttgaacttggtattttacgctttttagtcggctttactgatgcttgcttgttccctcaagtgcagactttgcttactaaaaatacgccagcaaaaatcacggggcgaattttttcttggaatcagtcagctatgtatatcggtaatatttttggaccgctactaggttcaactatctcaggattaactaattacagcactgtctttatcgttactgctgggattgttgtctttaatttgattttgtttagatttaatgtgattaaaaatttgcagtaaaaaaagtgtttgagtttttctcaaacacttttttctattccgcagctttctttgcttcatgatgattataaataaagtttgcaacatacccacaaataattagcaacaacgatacaatcataatttctctaattccggtatgaaaaattgtccgcattgttggcattaacgccttaggcaaactcttcgcagattctgcgtcactcaacttattcatcatggtcatcgtaatattgtggtgtccagcaattccacgtgctagagctaaattcataatcaccccataaacggcagccataatagtttgcgctaaaattctaatcaaaaaactaagcgatgtagcaggtgccatatccttttcaccagcgtcaatctgcacttttatttgaagaataacgaagattgagcctacacctaaaccagataacgctgcaatcgacatcaaaatctgatatggcgtactaatcggtacaataattaaaccgattactgttattgcaatcaatgtaaaatcgaaaattaacaaatgataattattaaaatgtctgagtaaatgcggcgtactttgtgaaccagcaatatcaaagattgagttaggaatcaacgtcatcccaccgattaaggccgttgtccctaagattgcctgcgaccacattggcaaataagtgttaactgcaatatatgcaccccaggcaaaggcaaaaagaatgaaatcaccaactaaagctttattagtaaaaaccgataatggcacgataggactagcagcttttttctcaactaagatgaaccagacaagcattacgatcccgataatcacgaaaatagccactagaaaattactagctagtcctaacatctgaattccaatcaaaaagcaagtcaaaccgccaattagggtaaaagcacctagtcggtcaaagacagtattgatgtttggcttgcgaatgccacgataaaaaagaaaactcaagataattgatatcaatcctaatggaacattgatataaaagacccagtgccaggacaaagcatcaacaatccagccaccaactagtggaccagcaatacaagcggccgaaaaactagctgcaatataactcaagatgaccgtcctgcgtttgatattcggataaatatagccaacaatcacataaggaagagaacccattccaccagcaccaacgcccatcagcactcgagaaataaggaaaaagtaaatatcaggagcaaccacttctaaaactgaacctaaaataaataaggctagtgacaattcgaaggcaaatttgttacccattctttcaccaattttactccaaattggcactgagaccgacattcccagtaaaaaacaggcaacaatccaacccatatactgaattccgtgtagatcggacacaattgctggaatcgccgtattaataattgtcgcatctagccctgacataatattagccagcaacaaagacaaagtaaccattgatatttgcttcttagtcatttaatcccacctttttaactctaaaaactactattactcatagtatgcaagatttaactagcaaaataaagcacaatatttttccactaaatcttgacaatctgtgtttttccgagttaaatataaagaaaataatagtgatgacctttaaagttagtcccgtgaggctaagaaggaaatctgcacaagctaatactttttgtcgttagctaatacagaaggaccatcttgagccatgagctcttggtggtctttttcttttggtcatccagaaaggaaaaactatggcaaaagaaataatcgatgctttaagcatgaaacgcgccttgatgcgaatgacctacgaaattgtcgaacgcaataaaggtactaaagatcttgtattagtcggaattaaaactcgcggctggtacttggccgagcgaatcgccaaaaatttgaaaaacttggaagatgttgaagtccctgtaggggcaattgacatttctcaataccgcgatgatttaccagaggctgagaaggaaaagatgatccacagccaacaacttgacttcgatatcaccgataaaaacgttatcttagttgacgacgttcttttcacaggtcggacaattagagctgcacttgatgcattaatggatcaaggccgtccagctaagattaatttagctgtcctagttgaccgcggtcatcgtgaattgccagttcgtcctgactttattggaaagaatatcccaacggcaatgaacgagaaggtcaaagttgcaatgactgaagtcgatgataaagatagtatcgaaatcgttaaataggagttttttgaatgaataaaaaagaaaagtacagaaatccggaggccgttttagacgtctatgaaaagccggaattcggccaaggcgtactgctatccttacagcatatgtttgctatgtttggttctaccgttttagtgccaattttaattggaattaacccaagcatcgctctactttcatcaggaatcggtaccttggtccacatgctcttgacccacttcaagattccagcatacctcggatcaagttttgccttcgttgctacaatgcaagccttaatgaaggctgatggctacccggcagttgcccagggtgcgatcgcttctggtttagtttacgtagttgttgcgatcatcattagcaaaattggttcaggctgggttaacaaagttttaccaccaatcgtagttggaccaatcatcatcgttattggtttgtcactagcaactactgccgctaatgacgctatgatgaataattctaagtatgatttgacttacttcggtgtagctatcttcactttggtcatgactttagttttccaaatgtgcttcaaaggcttcaccagtttggtttcaattatgctaggaattatctgtggctatatcttatcctgctgcctcggaattgttgatttctctggcgtggaaaaagcagcttggttcacattgccagcacttgatgtgcctggaatcagctaccatttcaaatggtaccctgccgctattttagccatggcaccaatcgccttcgttacaatgacggagcacatgggccatattatggtattgaattcattaactaaacgtgactttttcaagaatcctggcttacacagaacgatgatgggtgatggtctttcaacgattatcgctggtttcattggtggtcctcctaccacttcatacggtgaaaatatcggtgtgttagctatgactaaagtttactcagtttgggtattagccggtgctgctgtttcagcaattatcttcagctttgtcggtaaacttgctgcattgatcgaatcaattccaatgccagttatcggtgggatttccttcttacttttcggaacaattgcatctaatggtttaaagatcttagttgatgatcaaattgattttggtgaaaagcgcaatatgttgattgcttctgtcatcttggttatcgggattggtggagcttacttacaactgggcaatttccaacttacctcagttgccctttccaccatcatcggaatgcttttaaactggattttgcctaagaaagcagctagtgaaaaagctcaagaagaaaagattaagcaagaaaaacaagaaggtaaaatttaccaatagatagaataagccattcaaaaacccgttagttatcgcaatgatagctagcgggtttatttttcactctcactttgcgcacgcaatgttgtaagttgcgcgaaagttggcgaaagttagtgtaagttacgagagcaatagtatataatttatttacacaaataaatttaagtcatgaggtgacattaaatggactttttaaacttcaaagcaattacacaaactggtaattttaaaacaccatctgaaaatgaaaacatcgaatacaaagaagctagttggaaattacctaaatcattttgggaaactgttagctcttttgctaatactttaggtggaataatagtattaggcatagcagaagataagagtaaacatgaatttagtataactggtgtagacaatgttgaagacattgaaacacaaattttcaatgataataacaatatttcatgccttaatcgacctgtaattcaaaataatgatgttcagatctctgtttttcaaaataaaactattattcaagtaataattcatccagaaccctttaatacccgtccaataactgctttcggtaaagcatatatcagaaccggtgacggagatcgagtaactactaaagagcaacttaaatattttacagttgaaagtcaaaacgaaatcgatactcacttactcccttcgacctatacaatagaagatttagacgcagagaatatcaaagaatatcgcaaaataattgataaaaaaggtattattagcactaattctcaacttagtgatcaagaattcttatattcaattggtgttttcagaaaagatcgattaagtaattcaaatgaatatcatcttacagatggtggtctccttttctttggaaaatatatttcgataacagatcgtttcccacgttttcaattagactatcaacaatataatagcgataattctaccaactggaatgatagagtttctgcaggtgatatgaattaccctactttaaatatcttttctttttacaatttagttttaactaaaatagaagcaaatgttcctgatccttttattcaaggtagtgaccttagtagaacgtcctatcacaacgatctaatcatcgcagctaaggaagccctagtcaattgtttaatgcattcatattatgatggtatggtaggtgtaaaaattgtagatagacctagttactttgaatttacaaaccctggtactatgcgcgtaagtaaagaatcatttttacgtggacaatattcctccattagaaatactgaaatcgctagtttatttagacgaattggtgtctctgaaaccgcagctagtggcggccctagaattcttaatactgtattgcaaaataatttaaatgatcctgaaattaacattgattatgaaatcaatactactcgcattcgtatttttaagacttttgcaattgataatcaggaaaaattaactgaaccagagaaatttattatgtcttttgctagcagaaatcctaatttttcaataaatgatattgttaaagatccgcagaatcattttggtaaacaaaccacgattagaaaatatgtaaattcattagtagagaagcatttactatccaatgagaaaattggcaaaaaatatatctacaatttacagaaaaacaatgattatctaaatcgcgttaaacaccttaaacatcttgaagataatttactcaaatagatcattcaaaaagctcaacctacaaaattatgtagattgagctttttcatcttatttatcttcaaatattctaggcttatcgtcatcaagtgaaacatgcggaatttcggtgttatttgtctcaacttgatcgttctcagacaattctgccttcattaactcacttttggctttactagaagtattgcctaaaagtaaagttttctcctgcggcgtattcaccattgcctgtttttctttgaattttttataaacaaccgccgctactgcaccaatagctccagcaacaccgataattgtgccgattaatctcatctttttcatagggatcacctcgtattttgaaatcactttcttatccttaattatatctaattatgaggttgaacacatttttaatgcctattacctaaaactttccgcaatttctggatccatctcatcttctaaaacgctatacccttgatccaaagtcttgatcagagccatatcgtcatcatctagttcaaaatcaaacacatcaaagttttccgctaatctctccctatgaactgacttaggaattaccacataatttctttgtaaaaaccatctcaacattacctgagcagtagtcttatgatgcttttctgcaatcttttgcaagacaggattagtgaaaatgtggttggctccttccgcaaatggtgcccaggcttcaggttgcacgccctctttttccatatattgctgtgatttccattcttgattccagacattagtctcaatctggttcacagccggctttacatcattaaaagtaatcaaatcagctaagcgttcattccaaaaactacttacaccaattgccctaatgcgtccttccttgtatagccgctctagagcccgccaagtaccatagtagtcgttatatggcttgtgaatcagatacaaatcaatataatctaacttcagctttttcattgaatcgtcaaaggcttgcaaagtctgatcatagccatacttatcgacccagattttagaagtgacgaaaatatcctctcgtgggatgctgctatgcacaagtgcatctccaaccgcctgttcatttccataaatttgggcagtatccacaagtcgatagccaacttctaagccgttttccacaacttgttgagtttgagctaaatcatcaatttgataaacaccaaaacccaagcgaggcattttgacaccattatttaaaattacatagtctttcatatttcttctcgttttctagttagttcttgctatttaattttattttaacatagcccatgaaatccgactttattttgtgaaacatagatattatttcttaaaattaagtactcaagaaaagcctaaccagcatccctcaacggaattgccagttaggcttcttttatttttcaacttttgcttgataaaatccaaagctcatctgcttcaacattctagtaaaactatcaatgtctagctttttaccggtagtcaaagcttcaaattcaccatcaggatcaaccaatttgcggtcagtcctgtgaaatccatttctttcatagaatttcaggcgactaacacgctgcttataatttttcgccttcttggtaactggctcaatatcaatgacaatttgcttatcagggaatcgatcctctaacatcatcaagatcttggaaccataaccttgtcctcgcaatttttcattaatggctaaataggtcaaatagactgtattatcattctcagcataataagtaatgccgcaaaactgaccatcattataaattgcgtgaaacttaacatttcggtgtaatgacattgctaaaagagaaaacatggagaatctttcccaagctggaaaagccttcatatataacttcttagcgtcacgatatgcttttgtgccccatcgggcgggtttagagtctaaaatagtatccttcttttctaattaaaaattgattgttaataactctgaataatattattatacaaaaaaatttcctgaattgtcaaattaagtgcaacagtgtaagtgtcaatgtttttgcggtagcctttaaaccattagtctaaccttaatttcttaaatatttatatgacttaaatttctgcttagcttgcttaaataactattgccagctacctgtgcggttaatgcgccatgctggatgcctaaatgaacttcatgacgcttctttaagctgtcacgggccgctgcttttaattcctgttcagtcaatacagttatttctgaatcttcaaactcgctgctaagccaaaattccagctctcgattcttgatgcagcttaagatcctaagcatgccttctgctccagattttgaccatttcttgccttgccccttaacacggtaggtatacttgcggtggttgctctcgcagcagccaatggctttagtcacagtcagttttcgtttcttaaacggcttaatatcgtcccaatgacgatcaatataattccttaggcgccccagataatcatgattgagctcggtattcaattcatcaattagtcggctttctgcagtggttaggatagttttaactttgtcatagctgtatttgtattccaaagcagaaatcagcttgccttgcaggtcaggcgcaaaatatagcctttctttgattttcttatttaggtgaaagacatccaagaaatgctcatgacgcttgcatagccctacaatgtcatcgaagtctgttttggcatatccagcaccgccatcggcgttgctaagaattacagtatcagaaagatcataagtattggccaggtactccttggcttcgttcagcgcatcaagtcggcttaaagaaacaaattccttggcattgattcgctttctgcgtttcttgcttatattgacaatgccttcacagacctgatagcgatgaaattccaaccggcttttagtgcctttgatcaccacgccatcgccttcaagatacaaaactgggacctttttcttagtgcctgcggcatcatatcttgaatctgcttcttggcccgctttaatatttttcccggccatttttaccaaattgcccacctgcatatggctaatattaaagccagacaggcaattgactgctagagcagtattgcgataagtggcaacgctgcttacttctaagatgtttttgactgctaaaatactgtagcgcttgtatttgtcaaagcccattaattcatccaagggataccttgcttgtttgcctgggcagacatatcttcttctgacatacctaacttcgccaaaagccatattgattgagcgctcattcttcttatcaatctgatagccctgtgctttaaccttggtaatcatttcatcatcaactttagctaaagccaagaccatgatttccttaatcaggtttaagaagaaacagattatttttctttcacgcttaatataattatcttcagactttataatatttgcgatttcagttacaattgaattcataaaagaccagcttctaatgtgttttttgttcttaacatcagactactggtctttttgtttgagctcaagtccaaattcaaaggacttgggcttttttaattatttattcaacttaccgtaaaaaattatacacttaggcaacagttaggttatgaagagatatattgcttgaagagttcctctgctgtgtgatattggaggattcggcgatatttgtggttaatggcatcagttgcctgttgaacataagcttttgacttgtctttcatgctcttgcccttagggaagaattgacgcaaaagaccattgcagttctcattggtgcccctttcccatggagaatatgggtgagcaaagtaaatctggcagcccttgatcttggtcatatccgcaaactcagagccattgtcaaacgtgattgatttaaaccaggcaggatgtctgtcaatctccttttgaagcagcctttggcatgtgcttgcccgatagtcaggaatcttgataactacttcaaagcgtgtggttctttcagtcaaagtcattaaagcaggctgattcttgcgtctgacgcctttaaccagatctccttcccagtgcagcggagcttttctgtcttcaacctccttaggacgctgttcaatggaattgccaagatgcttcttgtgcaaagcgtgaccgccatggctgtgatgacgcttgttcctgcgtcttttgagcttcataggcagatcaatattgcttatgtccagcaagccctgatcaatatagcgatagacggttggtgtgctgggacaagggtagcctggcatagtccttttgaattcaccaacgaactcatcgatgctggtggcatcaaatttagctttaaagcgtctggagagcattctcaaaaagacagcataatgcttcaatggattgcgctgatagcagtttttgcgacgcttctcataataaatctgtgcagtatcagcgtaatagtgctcatacaataaatagctgctgtctctttgcaggacgcttccgcgtttgatttcgcgactgattgtcgacttatggcagccaacttcttgagcgataacagtacgggaagttatgccggaatccagcattgcttgaatttgtccacgttgtacgctggttaattgatgatagtgcttagaaatgctagaatttgaattggtcatgaagatcttcctttcttgatttttcgtcacttcaagtttaggtcttcatggcctttttgtttaacacttagtgttgcacttcaattttaaatccgggtacaaaaaaatttgatagtttcttaaaattattttatatccgttcaagctaatctaattcaaattagtttaatttctacctcaactttaacctgtaattcaaattaattttaatctcttaagacttttgagataagttttaagttaacttgaatttgctgaaaattttactgctagatttaaataaaaagaaagcttgtcatctaaccaatgtcattaagttaagacattgacaaattatcgacttggacttttaagatcattcatttgtgatttatcgcatttgaatgatcttttttcatgccaaataaacccaaattttgtttagaaattaggctacacgatataaataatatacagctgatttgggtttgagatttcttttgtcttttcgtcctggtctgatcggaattgtgtaatgactaatttgaataagaatctttttaaagatttcagttgaagaagaaattatatacatagcctggatgacaaaacatgactgtttgaaattgatcgcatattgatacttgcagtttttttgtggtacatatgcttgagcatcaatttgactgactgcgttaaacataatcatgtgggcatagatctccatttcaataaatctatcctgcttggaatgaaactgtacgctacctaaagcatatttcaactttttgaatgaagtttcaatgccccagcgcaaatggtagatctctttgatcctttttaagggataatcggctctatttagattagttagaacaacttcccattcttctttgcctgatttaggatcattaattctaaatttacaggcacgaaattttattgtacataactctccaaagtcccagctgccatctttggtatttttagaccgatattttatatattgacggtaatgatggttaaccaaatgaacgttttctgtagccttatgggtttcataataataattagaggtagtcacccggcaagctatatccttatcacactcttgattaggcaactcagctacttccttaaatgcgccatatcccgttttagtacgtatgacataataacagttaggcaggcgattacaattttcaatcatgttaaagccggtataacctcgatccatagtaactatatatggtccgcaatttagctttttaagcatttgaatggcggctttacgttcatccatctttgacttaggctgaaagatgcagtcttgataagtattatttaacaggtcatagagtgcattaacatgaatttggcaatatggctttcctttatgattgagatttccaacgatattctctgatttaggattccagatttgattaaaatcagacccatcaatggcaaatatacgatatttatgatcaaataactggatattaaataaattctgattaaatacagttagaatatgcttaaaacatgcgggtgaaagctgacctttgcgttggacataagcggaagtactgactactttatcgttatttttaatagctttttggccaaaagctctaaacaactcactggtcaaatcttttccttgcatattaatagtagttttaatgactgtagctgcatctaaaaaccgcttcctagtgaaggcatgaggatcatcgataaaatcatgaatatgctttccagtatcattgataatttgatcaagacgatctaaaatatttctgtgaagggctttcataattaacaccagctttctggcaataattttgaaggtttaataatttaatcagagggcgaaaaggtaggttcttttcgcctttattttatgcaaaaaaagaaccaaatcataatgattcggttctacagagattagattcaatttgtcaatgtcttaacttaatgacattggtcatctaacaaactttcttttttcatataataatcgttaactacatcaacttatatttcttcatcaattcttcaatatatgtgcctagaagttttatactgaaatcttgttctctctcaactttgatataaatttggcttccgcgccaaatttaaggatatgcaaagaaagacgcaattatcacatttttaattaaatatgagttaattgataatgagctgcaatttgagaaactttgcatttatcaactatttctgattcactcatgttttttattctttcatatggcatcaataattcaccggcaaaacattctgcttgccattctggatttttatatattggaatttctccatttcttctatatagagtcagtgaagaaggttgatgtaatataaggtgtagcaactcatgtgctattgtcattctatcacgtccaacatttctaatcgctcccatgtacaccgattctttaataagaattttatccttaacgatatcagtttgtgcctgaacatcatattctaattcatcattgtctacaatttcaaatgaaaaattaggatctaattctgatattttttctagtacacgcgtaatatcaatataaagttgacaaggatttatccctaataataatcgtacatctctagctaatgctcttaaatctttacgagattctggtttaacttcaaatattgaatcataactaattatgtctctcaccttctttcaaaatcttctgaatttgagctatttgtttatctgtcaaatcatcaaattttcttgcaaacatcaatgtagcttcctgcttttcaggtgaaaatttagatatatccaagctttcttcacttatgctcaatgcatcttttagctcttgttcttgctctctatccaagttatatctatcaacaatattattaattaatgatgcggaagccttcttatggccattttcaacaccagataaaaaagccgagcttaccccgacgttttccgccatatcataaagtcgttcatctcgatctaccctaagttttctcaaaaattttcccagtgctgtataagtcatagtttactttctcttttctaatatttactttctaaaatctttattataaataatctcattcactgaaagaagatcatatcttttaacatttaaataaattatactattactttcttttgtatcataagctggcaaataaaacagatcaccaacggagttaaaaacctttctaaattttacaccacctactttctcttgacctataactttaaattttgtcccagaaacagaatcactcaagtcgcccaaaatactaattctacaactatacctgttgcctgtttttaaaaaattgaacttatcatctcctaaaatatctgaatcatcaaacacagtataactttgattcgttttttgactctcaagaacaagatctcgagtaacttcataattaatgatttttgttaattcatacatagtattttatgcctttccaatcggataaaaactgacgatataaccattatctccatatgctattaaatatatcattccattgtgattatatataaaaacatctgctagctgtttaccttcttttctacttatatgtttaattggctttaattgaagaattttctttgcaagcaaaggaatattagtgtttgaaccaaaatcttttccatgccgagtttttatatgcaataacccactttttaagtttcctttctccagccacattaatttaccagcatagtttttcgtaatcatcactatatctgatttattatacttagcattactgttttctaattcatgcatcaaatctttaggctttagtcgttcttttgcaccattagtattaatataccctttataaccacttcccatcagcaagcctccttagcaaaaatttcttgccatgagggatatcttataaatttaatgtttcttttatatggtccaaaaatatcatcgggcatcgtaccataaaccaaaacttttttgggtctaactttttctagagcaatttctaatccagcttcaaataatattcttttttctttatcagcaatttgcccatatgtacccactgaacaaacttgatgcttaggaattccctgaaaaacaaaatcatatgatcttttatcaccccaacgtaaatttggaataatatttaaaccataattttgtaactctagagcaactctatttttctcatatacagcaaatttttgtaacactaatggttcgtcagcataaatgctataatcaggctggactacagatcctgcttttaacaatgatggaacaagtttagcaattctttcatcctttaatttagattcaaaacttttatcccattcatagaaacaaatagcatcatttaatgacgctatttttctgtcagaaaaacgaatcatttgaaaagggatcactaaatcttctttttgcttattcagtactgggtattcatcttccccagtaaaattagcattaagtaagttggacaatattatctcctcacattctactaaaaatcgaagagaaacatggtacactaaatatggttacagaagtatacttgcttctcttgcagcgattgtttcagcaatcgctgtattttatttctgttttcagttaatattattaacttatttagttaatttgtcaaatataaaaagaaagtcttgaactgagacctaaaagttagacacttttaggtctttttctacgtaaagtcaagcataataagaagtttggcttcattttttgtttaaatttcaacttaaacatcttttagtgtcgatttatttttttagttagacacgacaaataagcccagatccatatctgatttttgggcttagcgttataatgtacttgatcaattaattacgactaaagtctttttgattatgtgtggctacgttgtaatcatatggttgatcattgataatcagggcataaatggttctgattagtttatgaattgaagcaatagctatctttttgaaccctttggtttgagaggatagctttttgctttcataataatctgctatatgacacggatttgtcttagctgcattatcaatttgtccaatagctcgataaagcaacttacgtgcgactgcattgccatgtttagtaatacttaaattagagtccatttctcctgactgatatctgcctggatcaattccgataaaagcattgattttattaggattactaaatctgcgtaaatctcctaactctgctaaaactctgacagcagtggtctgtgcaaagcctggaatgctttctaggttttctaaatcatgattaggcaaagacttcgctaacttaaccattcttgcgattaaattttctctttgatcacttaaattaagcaatctgtgtgcataatactgcacttgctcgacttctatgctagagcaagatacaactggataagcttgataagctaattcaattaatttatctgcagtccttagagcgtgtttaaaagcaatcccctttaagctcattaaccagttaataagctgttttttatcttctcttcttactaagtcacaatgaggatatcgcacaactatttgccagtaatttttacctctagcagaagaaaataaattttcaatttcaggaaaagtcgattgtagagcttggtgaagtcgatttttagctattaccaagtcacttgtcagctggtcatagaagcggctcaaagcattaagctgcttataagtttgggattcgctttgattaaccggatggcgataaagtctttgaattaaagctaaatgataagcatcagttttatcggtcttgttgtagcgtagccccatattcatctcttttttggctttaagcggattaataacaacatattcatagccgtagtcttcaagaaaagcctgcagtctgcgtgaataaacaccggtagcttcaaaaataatttgcggatgtttagaaaaagcggttaattcatgaagcaattgaataaaaccaggacgattattagtaatggttagttcatttttgctttcaccaattagttcacaaacagtagaagtagacttgcttacatcaattccaaaagtaacttgcataataaaaacctccaaaacttagtagtaaaacgtatttacttaagaaatcagatctaattttctaaactcgacatctagtgtccacattcttcgaagagactattgaaaacttaagtaaaactgccagtttattatgcgacatcaagtgtctaaagacctcagggcatatcgttttaccactactttaattctacaaaagaataaaaatagtgaatcaattatcccgtcggataactaattcactatttagcttagaatgtttactatgtctaaatttaataaagaacaaaaaatagaaatttatcataaatggaaagatgaaaatatctcaatcagtcaattggctaaagcgtacagaatgaatctagctaatttagactatatgcttagattaattgatatgcatggaatagaaattttaactactaaaaaccaaagctattccaaagagtttaagcagcgaactattgaacaagcaatctttggcaataaaccatacttacagctgtctttggaactggggtttaaaagtattggcatgcttaacaattggattagagaatataagaaaaacgggtataatgtcattatcaaacagaaaggacgccctgcccgtgaccaaagaaaagcagaaatctcgcaaggaactggagaaagagatccagcagctgaaagaagaaaacttgcgattgcgtattgtgaacgaatacgtaaaaaaactaagtgccttggaccaagaagatcagaagaaatagctagggtgattacggatctaaggcaagaattcaaagttagtttaaattatgtattagctgcgattgcagagcaccctgagctacctataattgccagaagctcatactacaagattatcaaacgacagcccgtcaagcctaaacggtcaaagcttattgctagaatccatgagatttttaatcatcatcaaggccgctatggatatcgcagagtagctttgcagttaatcagagagggctggaaagttacggagaaaaccgttcgctattggatgcataaattaggtcttaaaggcatcaggcgcaataagcgcaaatattcaagctataaaggtactattggcaaaatagctccaaatttaattcatcgtgatttcttcgcagccctgcctaacacaaaatggtatactgatatcactgaatttcatcttaataatgaaaagctttatttatcgcctattctagacggctgcggtggcgatatagtttcttatactatctccaaacatccagatatggatttagtaatgacaatgcttgacaaggcttttgccaaagaaacagctcttaataactgcatttttcatactgatcagggctgtcagtatcaaagccctcgttatcagcgagctttaaaactccatggtattactcaaagcatgtccagaaagggcaactccatggatgatgggctaatggagaacttctttggcctgctcaaaactgaaatgttctatgatcaagaatacaagtatcataatcttcaagaattaactcaagcaatcgaggaatatatcgaatactataacaacgaaaggataaagagcagattaaaaggcttaaccccgaaagagtatcgaagtcaagcctctattaatccaatattttaattgtctactttttacgtctcagtacatctgtcaatctaacaaactttcttttttcataaataatcgttaactacatcaacttatatttcttcatcaattcttcgatataagtgcccttaaccttcttaagcatccctttaattgcaaacttttcaggcattggcaaatcaagatcagccaacttcttctggtcattcaggtaatacatcgcattcatcaacattctgacatcaaatgcggaagcgaagacttctggtacaccgcggtcaatattaagcaaagtgtagacagcttccattgccgtccgaactgaatactctgtcgtaaagacagtgtctcttggagtttcggcaaagttaccaataaaggctaagttcttagaatgatctggaacaacctttgggcggtcgcctaaagctcttggcataaagtaagaagtaatatatggcatgtgaaccggaattgttgtagctgcggcagctatttcaggaattctttcttccggcacacccatgtgatagagccactcttcacacatttcaagcccattacaatcaggcatcgtcttttccacataattacctttggtatcagagaacaaaccatataaccaaacaatcaattcatttggtttttgcgccttaaagtgtggctgacggctgattgagtaacctaatagccaattagaatccttaatagtagttggtccactagttacgattgagccactgtgtggatcctttttattaacagcttcaataaatggcacaacatcatcattcttaaaggtaatagttgcagacatccgccagttagcctttggaatatccttgcaaaagacatcaggatggccaaagtcttcatcttgagctgctaagttcttccacaatcgccagcttgcacccaattaatgttctgctggagcgggatgcagttgatctccataggtagtactatcagtaattgaaccattagtaacgaagactaagtcatttggtgttaagtcaatggtcttcttttcgccatcttcggttaaaataatttgtttagcaaccttttcgccgtcagagcggttaacaaagatattatcaaccaccgtattatagtggaagattacaccacgatcctttaaatacttgaccagcggcaaaatcaatgattcatattggttatacttggtaaaacgcaatgatgaaagattcttcaaggttgctacatgctgtacaaagcgcatcaagtagcggcgcatctccatcgcacttgcccatggttcaaaagcaaacattgttgaccaatataaccaaaagttagattcaaagaattccttagtgaagacttcattaatcttcttattttgcaagtctttttcgggagttaaacaaagatcaacaatttccttcactgcctttggcgttaataaaagttgcccatcagtcggcaaagcttgaccacgatttacaattactctagttttagcataacttggatcttttctatttaaacgatagaaggaatccaaaatagattcaccttcatggtcaggcgaagggattgatctaaataaatcccacaaacattcaaagtgcggctccatttcacgaccgccacgaatgatgtaactttccttttctttattatagatcccatccattgagccaccaggcagacctaattcttcaaaaatgtgaattttctcgcccttcatttgaccatcacgaattaaaaagacagcagtagctaatgcagccaagccactaccaacaatataagcagatttttgatcaacatctttaggtttatcagccttaacaaaggcttcataattgccattactataatgcataattgacacttctttcaataatcgttacacttgtaactatttacgcttataatataatgtaagcgatatcagttgtcgaacattttacatttggggatgatcttgatgaatatgaagagtctgcatacgcagcaacaaattgaacatgcattattcaaattactacaaaaaaagccttatacggagatctctattgcagaaatcacccgtaaggctaaggtatctcgtacttccttttatcgcaattatgaccaaaaagatgaagtcattgcgcaatttttatttaatcaataccataattttatcgctgatattgatcaacataatttgagaacttttaagcagcagcttactgcctaccttgaattcttcaaagataatcctcaactaatgaaattactgcttgatgcaggatttgaaagagaattacttaattttcaaactaaatatttgaaaaagctgatgtcagtttaccattctgatgtccacctgcccgactatgcaatagcctatcaatctggtggaatctatatgctgttagtctggtgggttaagcaaaattatcagaccagcttgactgatttaatcacttatgccgaaaaacacattatgctgtaactaaaaaagaagagctcacaaatcgagctttcattttcaaaattattgcaatttcttgcattttttaccaaagttaaagtagaaattcattacaaaggcgataattaacaaaatcaatgaaaccaacataatttccttaataccgccgtggaaaatagttctcattgttggcactaagttttgcggcaaactcttggcacttcgcgcatcactcaatttattcatcatggtcatcgtgattcccttgtgcgtttgaactccgctggccaagttcagattcataattacgccataaacagcagccattactgtttgagctaaaattctgatcaaatatgaagttgaagtggccgttgccatattctttagtcctgcatcaagttgtacctttaattgcaaagcaacaaagataaagccaaccccaatgccagaaaatgcaccaataaaggtcaacatctgcacaggcgtatgtatgccagaaataaacaaaccagctgatgagataatcatggcaactattccaatcaaaactaatttaaaggttgtcatatgctcctgaatcgccgctacactttgagatgcgataatttcaacaatcgaatttggaattaacgtcatcccaccaattaaagctgacaagcctagtaatgcctgagcccacattggcatataggtgtttactgctaaaaaggcaccccaagtaaaggcaaataataaaaagtcgccatctaaatctttatttttaaataaagaaattggaataattggattgtctgcatgaccttcgcgaataaagaaaaagacgatgaagactaaactaattataatcaatccaattatgatccagttagcggttaaaccaactagttgcacgcccatcaagaataaaagcagtccgattactaataaagtagcaccagggatatcgaaaaccggtgtcttttttggagtaaccggtttgtagtaaattaaacaaatcaaaaatgcgattaagccaattggaatattgatatagaagacccagtgccaagagaaagcatcaattaaccaaccaccaacaagtggccctaagatcgcagccccattccagctggcagttaaatagcctaatactttggttctagttttaatatttttaaacacataaccagcaatgatataaggtaaagaacccataccacctgcaccgattcccatgataaagcgagagcacagaaagaaaataatatttggcgctatcccttgtagagccgatcccaaaacaaagagtagcagtgaaagctcaaaggctcgtttgttagtgattttctctccgatcttggtccaaatcggaatcgaaatcgacattcctaataagaaaattgccacaatccaacccatgaattgaattccgtgcaaggccgcgacgatggctggaatagcggtattaataatagttccgtctagccccgacatcacgttgccaagcatcaaggctgccgtcaccattgtaatctgttttttattcatgcttaacttctttctatggtatgtaaaaagcgttagacaaaaatttctaacgcttttgagtaaaaaaatatggaggatacagggctcgaacctgtgacctcctgcttgtaaggcagatgctctcccagctgagctaatcctccattatggggcggaatgtgggaatcgaacccacgcatgctggatccacaaaccagtgtgttaaccccttcaccaattccgccatcaacggtccatatgggatttgaacccatgatctcctccgtgacagggaggcgagataaaccactgctccaatggaccaaactagaggaggatgtgggatttgaacccacgcgcggcataaccgcctaacggttttcaaaaccgtccccttaagccacttgggtaatcctccatagccgaacagatactagtataccaaagtgagaagataacgcaagaccttttttaaaaaaaagcaaaaaaataaagcctttcggcttcattaactatgtaaatttttctggaacagcaaatacttatattctttgccagcaatttcaataaaacgttgagtagcaatattacgccagccaaagtgcttaaagaattcttgtgcatctttatcttcagccagacaccacaagtaaatcttgccatagcccatcttcttcagttcattttctgcggcatttagcaaggtcttacctacattgtagccttgaaaatcaggtttaacatataatgccatcaactcaccgcagccaagcattctagtgtcacgtggacgaccatagctaacggctgcttgaacctcgttattatcgtctttaaaaactaaattatgacgaccactctcattgagtcgttttacccaagcagtagccggaatattatccaaaaatacatctggtagcacgcctttatacgtctcttgccaagttgtttggaaaagcttacttgtttgttttgcttcgtcttcactaattaatggtttaataatcatatttacttcttctttgtcaaaacagtcacagcctctacatgtggcgtttgtgggaacatatcaacaggatcgattcgcttaaattcataaccttgttcttggaacaaaagcaagtcgcgaatcattgttgcaggattgcacgaaatataaacgaccttcttaggtccagtcttaactgtcgcattaataaattcaggtgtcaacccttttctaggtggatcaacaaaaaccacatcggtcttcataccctttttagcccaacgcggcattatttcttcagccttgcctaagtaatactttgcgttttcaataccatttagctcggcattgtccttggcatccttgatcgcatcccggacaacttcgattccacgcacggccttcacatgcttagctacactcaaaccaatcgttccaattcccgaatatgcatcaattactacatcatccgaacctaaatctgcttgcttaatcgctaaatcatacaagcgcggtgtttgcagcgaattaatctggaagaaactttgaggtgaaattctaaactttaaatcaccaatttgatcagtaatctggtcattaccgaaaactaggtaatcctttttacccaaaatcacattggtcttcttaggattatagttcaagactaaacctgaaaccttaggaatctggctaatctcagctgcaacacccatcatttgtgggaaatccttaacccggctgaccaaaataaccattatctcgccattagccttactacgacgcacatcaagatagcgtataattcccgtattgtttacctcgtcataaggcgcaatcttgtacttgcgcaacacatcacgcactgcaaccaatacacgatcaatttccggatcagtggtaaagaaatttgtcaaaggcactaaatcatgtgaatgtcgtctaaaaaagccaatctcaagttgtccattatattctcgcacaggaacttgggccttgttgcgataccctgtttgctcaggactaggcaaagtttgtcctacttcaatctcatctaaatgtgccttcttaagtaagttaacaacttgattacgcttgaattcaagttgcttatcatacttgatatgagctaaagaagcgagtcccgtttgaacccattgattcaacttgatcttaactcgatcaggactttctttttttatttcttcaattttagcaaaagcaaagttcttcttaacctttaaaatctttgcactaaccacttcacctggaagtgcattagtaacaaatacggtcattccctcgtaatgggccacacccattgcttcatacgaaagatcggtaatttctaaatctataatttgattctttttcatactcactcaaccttaaaaaaatagctctctattattataatacttgaccaatctttgtgcttcaaaaaataatcgactgctttttagaaccaactatcacccatatacgcatgcaaaatgtggttagccgctactttcaacctcaaataattaatattattagaaaatagcataatcatacgcttggtcttgtaattcgcaacaaagcagcaattataaccagggatactgccattagcgcgaatgatgtcaccattaaaatacactccaccaaaataagctaccgtctgatgctgggcttggtggtaatactcgtttaccattttaggatttttcagcacatcgttatatacaaacttccaataatcaattggtgacatgaataagttccctgctccaaagtccgacgacgtcgtcactgtcacttggtgccagtcaacatttttactcattggctgagggatctcgttttggttaacctcagaaaaatccttaactttctggagcttaagtggcttagcaaaatcggtctgaatataagcattataacttaaattagtctgcttgctaataatagctgctagcaattcataatcaacatcttggtaatcccaagtatgaagatgatcattctccatgtgattaagcatataagctatttgctctttctgatttttaagcggagaagatggtcgagcattgttaaccaagccactagtatgattcatcagcccatgaattgtaatatctttactacctgaaacttgaggataatagttagataaagaggtattccaacctaataacttttcttgttgcagctgataaattgcagttcctgtcataattttttgtagcgaagcaatcggaaacaattgattagcgttaactatttggcttgaatcagtggtctccttattttggacaacaatcggttgcccctttttatcattaattaacattacaccgttgatatgatgaaacttcatataatcatgcagctgttctttctgattcttaatgccattatccagcttatcccctggctgcacaatgaataaaaatattgcaaaggcacaaagtgccaaaaagatggataaagctcgttttttatgcataaagattcctcttaattactatcccaagcaatgtaataactatatttcttcaattgtaaatctagtatctaggaagactcaactatttggttaatttttgcatctaaaaatattttacttaaatctattgacatacttttttaatcttgctatcatattgctcaacaagaaacgaaaagtagcaactttgctcagcgttcagagaactggtggtagctgcaaaccagacaggcaaagtttgacgaaatacgtcgttataatgttgttcggaaaaattcagaaccgttaccatctgatagagattcaagttcttatgcttgaaagagtgggtggtaccacggctattgtcgtcccgttgacttaggtcaacgggattttttatttggaggaataaacaatgaaaaaagaaaaaatttcctttacagaatcaatcattatcctgatagctctattagctatcctcggcattgctgtaatcaaatttagtctctcaccagaagtgcctgttttatttacagtccttctacttactttctgggctagattacgtggcttctcctggcaggatgtccaagatgggatcaaagaggggatcggcgttgcaattattccaatttttatttttattttaattggtgctttaatcggaatctggattaaagcaggaattatcccttccattatggtcttaggttttcacttaattagtggcagcttctttgttccatctgttttcatcgtttgttctatcattgggatggcaatcggtagcggttttacgaccatctcgactgtcggaattgcgctttttggcatcggtactagtatgaatattaacccagcattggttgccggtgcaattatttctggtgcggtattcggcgataaaatgtctccgctatccgattcaactaacctttcttcagctgttgctgaaagtgaattatttgctcacattaagaacgtgatgtggtcaacaattcctgcatttattgtttcattaattttattctggattttaggcaacagtggtcacatggacctaaccaagatcgaacacacttctcgtattctccaagctaactttagcatcacgtggtgggctcttatcccgattattttaatgattttctgtgcatggcgcaagatcccggcaattcccaccttatttatgaacattgctgtcaccgttataatgatttttattcaaagcccacacgaatcaattcaatcacttaataatttagtcatgaatggctttgttgctaaaaccagtgataaagcagttgacgctctccttacccgtggtggaatttccagcatgatggcaactgtagcattaattatttctaccctatccttagggggaatgttgatgaaatttaacgttattcaaagtgccatggagccgcttgtaaagcatctcaagaaaccaggtcggttaattacagtcactattttgtcaggaatctgcatcaacctttttgttggtgaacaatacttatcagtaattttacctggacgtgcctttaaacctgcatttgataaaattaagctttcaccattggcacttagccgcgtgcttgaagatggcggtagcgtaattaactacttgattccatggggagttgccggttcatttgctgcctcaactttaggcgtacccgtcttacaattcttaccatttgtcttcttcagtctgctttcaccaatcttctctattttaagtggaattactggaatcggcttgaagtgggttaaagaaaagtagaaaataatcttgtgaaaaaagttcctaggatagttgtctttaggaacttttttacgcaatctattagaactcaggaataaataatgcaaattaatgaccacaaaagtaactggtagttagctgatattggtgattatcttaaggttatcgctaatggatgtgtcatgttacagccaattattattcttttcttgaccttaccatttggctattcgcaacaactctttttggcatcgctttataacctagtcaaatttacgtcaccagccttcagcaacatggtcattttcacaatgttgcttcatttatttggcaatttttcagtggcaatgctgcacctcatctttggtacagtgtcatgatgctgcaatttttacttattatgccttggattaaggctatctgtaactgggtcaagcattcttattgccgcctagcagttgcagttattagatcgtatcttcatcagctttctaatttttgggctctacggtggtttaagctggaactttcatcatgaaattcagacttttctatttaaatattggtagctaattgttggaatttatcttttaacttacttttggaccagagatttatttttagctacttccaaattaacagatctaaccaacgacagttattacctaccttcaatggcaatttatgctttagctgttatattcttgacttacctaatctgtattgcacaaaaagtctttaatatgaaccattggctaaaatcaattcattttctagctttttatgcttatcgagcatttttagccaatgttttttgggatcggatcttttggcaatattttaattttaaacagctagctttacaaaacatttatctagctgtcttactactctggatttgcacatggtgtgcttcatatttatctgtttatgtaattcaccaactttggcttaaaattaatgattctgtcgatccatcctaatttgcgcacgtcgatattcctgactgtcacgtgtaggttgagcaattatgtctgtaactattatttcatgatcatttcgttcaaagacgattgcctgatctaattccgcatttacttttttattgatagtggaattttgattaaatttcaaatcatcaagctcccgatcaataaatgctttttgcgagctggttagctgatgatatttatctgcagcagctttagtaaacgacagaatcattttacgattaaactcacctattttatccggatgctcacttctttgaccgcgcacatcatcatcaatatatctttttttcatcaaaaatcacttcctctatttttactatacaggagatcatttctattagatatttttctgcttggtttagttttttcataacccggatttaaaattgaagtgcaacactaagtgttaaacaaaaaggccatgaagacctaaacttgaagtgacgaaaaatcaagaaaggaagatctttatgaccaattcaaattctagcatttctaagcactatcatcaattaaccagcgtacaacgtggacaaattcaagcaatgctggattccggcataacttcccgtactgttatcgctcaagaagtcggctgccataagtcgacaatcagtcgcgaaatcaaacgcggaagtgtcctgcaaagagacagcagctatttattgtatgagcactattacgctgatactgcacagatttattatgagaagcgtcgcaaaaactgctatcagcgcaatccattgaagcattatgctgtctttttgagaatgctctccagacgctttaaagctaaatttgatgccaccagcatcgatgagttcgttggtgaattcaaaaggactatgccaggctacccttgtcccagcacaccaaccgtctatcgctatattgatcagggcttgctggacataagcaatattgatctgcctatgaagctcaaaagacgcaggaacaagcgtcatcacagccatggcggtcacgctttgcacaagaagcatcttggcaattccattgaacagcgtcctaaagagattgaagacagaaaagctccgctgcactgggaaggagatctggttaaaggcgtcagacgcaagaatcagcctgctttaatgactttgactgaaagaaccacacgctttgaagtagttatcaagattcctgactatcgggcaagcacatgccaaaggctgcttcaaaaggagattgacagacatcctgcctggtttaaatcaatcacgtttgacaatggctctgagtttgcggatatgaccaagatcaagggctgccagatttactttgctcacccatattctccatgggaaaggggcaccaatgagaactgcaatggtcttttgcgtcaattcttccctaagggcaagagcatgaaagacaagtcaaaagcttatgttcaacaggcaactgatgccattaaccacaaatatcgccgaatcctccaatatcacacagcagaggaactcttcaagcaatatatctcttcataacctaactgttgcacttaatttgacaattcaggagttttttcataagaaaaacttactatttatcatttatgtcctaaatacggtaaaatagataggacaattaaataaaaggagtgtagtaatctatggataacttttctaatactccaggacggcgtcaagtccaagatatttctgcggttaacagtttcttaactaagatgtacagtctaatgattttagctgttttagtttctgccgcaactgctttcttgacgacaactgtatttgcttcagcaattgctaacatgtcacaagccgtttactggatcattatttttgttccaattgttttatgtatgactatcagctttaaggcagctaagaatccgacactaggtttagtccttttgttaattctttcagcagtctatggctttgaatttgcctttattgcaggtgccttcaccactgcctcaattgcgggtgcctttttatctgcagctggggtatttgcagcaatggcaatttttggtactgtaactaagcgcgatttaagtaattggggttcatatcttggtgctgctttaattggtttcttagttgcatggctagtaaatgccttctttatcagaagcggtgctgccacctttatattctcttgcattggtgtattacttttcactggcttaacagcttatgatgcacataatgctaagaaaatttatatgacttacggtggtcaagtttcagacaccggtttagctgtaatgggtgcgttaaatatgtaccttgatttcatcaacattttcatgttcttgcttcaaatttttggcatgggcggaaatcgcgattaatctataattataaaaatagcgttgattggcttacactaatcaacgctatttttatttgatgatttcttatcctttttaagaaaactagtcagttcatttagcggcgtcttatgcaaaaatgccataatattttctctcatatcataaggtgaaagacgatcactgtagtttaataaaacccgaactaaatcaatcatactattaataaatacttgaacatcaataagcattgctattctttctttaccggtcaatttaatcccttggctatcatccatactattaattctctcaaaaaactcatcacaactcgtatcaaaaatcaaattataaaaacgaatatcaccattatctgaaagtagcaattgaatttcacgtttatgatcaaaacaataagaaatagtatttttggttgctgataatactgcttttaattgatcttgtgtaggaagagtcatatcaatattagctagagattcgcgatcacgtctaatactatctttatatccttcgataaaatcattttcaacgtctgccactaagctattaacgtctgcataatattgataaaaagttctggtacttacacctgatacttcaataatgtctttgacttttaactcataaacacttttttcttctaagcatgttagcagagcttctactaagcgattcttagtattagttactctaatatccaaatagcacccaatcctttcatctcattattcaaacataacatccggtgaaaataacattttactatcgtccaaatcttttttactttttcaacctaactgtaatttcattgttttaagcaagatgcattcataaaatagtaattgaaaaatgtaattagtaggtgatataagatgtttaatcaaaataaaatcattatttttaataatagaaaaaataattgctctaagaactatactttacctatgcatgatccaaaactgctaaagcaatttcaatcaagtctcttagatgacataacatattatccttttcatcctcttagacatataaataagacttttgttagattcatcagtacttcaggcaagcctttattcaacgattttgtctatcatttgcaaactcgtgaattaattttgaatgacttaatcttaattagttataagtacctggtcaggaataaagctaatattgcttactctgatctaagaaagaattgggtaaatgtatttaacttatccttctgtaccaacgatattaagttcaacaaggaagctttattaaacaaaataaatgaagctaacaagatgtaattattcctttaacttccacatcttattaaccaaaaagaaaaagagttcaagtttagattgcttgaactcttttcgtttcttttgcttcaatttattattgtcttttagttagcttagccaccaacataaaattcaatatgctgttgcaaattgttaaattcaactggacaataaccaccgatctcaccatcaagattaactggtaagtcttgcccttcacttttaccaatcaactcggccttcaggctacgcgttttggtataaatgatattgggatcatcaacatgtttaccattcaaagccaatgccatcaacttcatcatgctaacagggtcagaaggcttgaccacgatcaattggaataatccatcactaagctgtgcatcaggcataacttgctcaaaaccaccaattgaattagtcattcctagtaggaacattgataattttccttcataaacgccatcatcataagtcaaacgcatctcattctcagtcaagtgtggcaacatttctgcccccttgattaagtatgcggcataacccaaagctgacttaacctcagatggtacgccatatgttaactcagttaaagaaccgctggcagcaatattaacgaaatattgaattttgtcaccaaaaacagctttaccgatatccattttacgagttttattctttaagattactttagcagcatctggaatattatcacgtggaatggctaatgcacgagcataatcattagtagtcccagcaggaataattgccattttaggcctgttttctaaaaaggcaatcccgttaactacttcattgattgtaccgtccccaccagctgctacgattaaatcaaagccttccttagcagcacgagtagcttcattgcgagcactattttcttcaggtgtagttctaaaagcactagcttcgtagcctgcttgttctaatacatctaaaatatcggccacattctttggcatctgttcgtgacctgatacaggattataaattaatcttgcttttctagtcataattactacctaacgttctaaaaattaacgactttgcaattcttggttaagtaacttgttaaccatcttagggttagccttaccacgagtttgcttcatgatttgaccaactaagaagccgattgcacgatccttaccattcttaaagtcttcaacagattgagggttatcatcaacaaccttcttaaccattggagctaaaacagaagtatctgacaattgaaccataccattatcttcaacatacttcttaggatcagtaccattttcaatagtttcggcaaagaccttcttagcaatcttagatgaaatagtaccgtccttgattaacttgatcatttctgccaagtgttcaggagttaacttaatatccttcaattcaatacggtgatcattcaagtaaccattaacttgagtgttcatccagttagctgcaagagttggatctgcgccagctgcaacagcttcatcaaagaagtcagaactttccttagtttgaagcaaaacgttagcgtcatatggcttcaaaccatatttatttacatagtcatcgtaacgagcaaatggcccctttggtaattccttagcaatttcatcgatccattcttgtgaaatatgatctggtgcaatatctggttctgggaagtaacggtaatccgatgcgccttccttaacacgttccaaaacagtcttaccagttgcttcgtcaaaacgacgagttgaaagttgaatatgaccaccagctaatagaacttgttcttgacgcttttcttcgtaggcaagtgaacgacgtacgtgatcgaatgagttcaagttcttcatttcgaccttagtaccaagttccttttgacctgctggacggatggaaatgttagtatcaacacgcattgaaccttcttccatcttaacgtctgaagcaccagtaaactgaacaatcttacgtaacttttcaaggtaagcgtaagcttcttctggatcttccatatctggttcagaaacaacttcaagaagtggcacaccctgacggtttaagtcaacgtatgaataaccgttagttccgtgagtgttcttaccggcatcttcttcaatgtgcatttcgtgaataccgattctcttcttcttaccacgaacttcaacttcgatgtaaccatcacgagcaagtggttggaagaactgagtaatctggtaagccttagggttatcaggatagaagtagttcttacggtcgaagtgagtagttggcaaaatgtgagcgtgggttgcgatggcaaccataatacctaaacggtaaacgttcttgttaaccattggcaaggtaccaggcatagcccagtcaattacattagtctccgtgttttgttcagcaccatatgttactggtgaaggagagaaaatcttactctttgtctttaattcgaagtggacttcaagtccgatagtcgatttaaaattcattcaattagtcctccattccagttggtgtttttcataaaacttgttagtgcgttcgataaagtcagcagtcttgaagacattaccttcatcaaaacgcttagccataacttgtaaaccgacaggcatcccatcaactaaaccagctggaacactagctgcaggaatacctgctaagttggcagaaatagttaaaatatcattgttgtacatcttaattgggtctgaaacttcttcgccaataccaaatgctggctcagtagtagttggtccaacaattacatcattttctgcaaagatcttgtcaaagtcatcacagatcaaggttctaaccttagcagcttgtctaaagaaacggtcatatgaaccagctgaaagggcaaatgaaccaagcataattctacgcttaacttcagcaccaaagccttcagaacgtgatttaacgtaaacatcaagtaagttcttagtgtccttagcacggtagccgtaacgaataccatcgtatctttgcaagtttgaagaagcttcacttgaagcaatgatgtagtagtcaggaacaacgtatttagtatgtggcaatgaaacctcattgatcactgcaccagcatccttcaaagcatcgatttgcttttgaataacttcacgcatcttaccgtcaactgcttccatgtattccttaggaacagctacgcgaaggcccttaacatcttgaccgataaacttggtaaagtcaggtacttcacgggttgaaacagttgagtcatgctcatctgcaccagcaattacgtttaatacttcagctgaatccttaacgcgcttagtcattacaccaatttgatcaagtgaagaaccaaatgcgataagaccccaacgtgatacacgaccgtaagttggcttaataccaaaaataccgttaaatgcggctggttgacgaattgaaccaccagtatctgaaccaagtgctgctacaacttgaccactagcaactgcagctgctgaaccaccagatgaaccaccaggaactttatctaaattccatgggttgtgagtagcaccataatatgagtgttcagttgatgaacccatggcaaattcatccatgttggtcttacctacaaaggttacgccagcttttttaagcttagaaataactgttgcatcatacattggcatgtagttgtacaaaatgtgactagcagcagttgtcttaatcccgttagtgatgatgttatccttaattgcgattggaatacctgctaacttactcttggagtagtcaaggttatctgcaggcttagcatcatctaaaacagtgatccaagcatttaacttcttatctgtatccttaatgtttgccacagtgtctttagctaacttatctgctgacaagtcaccgctggcaagctttttgtttaatgaatcaatattttcgtttaagtaattcattactcgtcctcatccttattaataattacaggaaccttaatgtagccgtttgccttttcaggaacgttagccatcaatgtttctctgtcttgtccttgccagtgttcaggtttatcttctctgaagacagtatcacgatcaacaacttgaactgtttcatcaacaccctcagtatcaacttcactaagttgatcagccatattgataattgatcccatttgatcagtaaatttatctaattcttcttcattaaacgcaagtcgcgaaagagtcgcaacgtgtttaatggtatcttttgtgatttccacgcaaatacctcctattcgccgccataaacatggacttgataatcactatcgccggtttcttttgcaactaaagcttgtacatcatctactgaaccaattttgatttcaattgggatattgccagacaagtactttttagctgacgacaaaaccaaacgggtaaaactttgaatttgttcatagccataaaattgcgttgttacggaaatgttttcttgtgaaagcttaccgtttgtataacgcaaagttgccgttaccccactaatattagggaagtagttttgaatagccgtcttgaaatcattgaagtgcgatgcatcatcactgttaattgctttttcactaccagttgtcggtaaaacttgcattttttccgacatggatttccatttagatattttactactattagcggccgctgtcccgtaagcgaagtaagttccaccaactaatgaatcttttccagtcttggagaacaaaccaatcgtaatcggaatattctttaaagctttcttcttacgcaagcgagcaacaatttcattagctattttttcaccttgagctttttgctcagcacgtgaaatagtagtttgaaattctgcaccgttacgctttttctgataataatcaaccgaattcatggctaagcccaagctcataccacctaaattatacttggaaccagatccagtcaaataatcttgttcgataatttcttccaaataaattggattacgcgtatcggttccggtcttaccattatttactgggtttaaaccatcaggatttgatttggatttacgcattaaccaatcagttacagttgaggtatccaaatattgtccttcttggaagacgtattgattaggcgaaaattgattcttagaaatttgaatcagccctcgctctaattcacgcgtatcaacagaattatcattatcagtagctgttaatcctgcaatcggactaatattatagcgaccatttttcattaaaacggtatagccattcgttcccgtgttagtagtttgatagctttttttcttagtggttgaagtggttgtcgcattatttgctaaactagaatccttcaacttaccacaaccacttagagtaagcgcgattccagctaaagccattacttgcaaatattttttcacaataattgtcctttattcaatttgtgcaattgcttcttcttcagtcaaaagtggtacgcctaaagtctgcgctttagtatacttagaaccagcatctttgccataaatcacgtaatcggtcttatgcgaaactgaacccgtaactttggcacctaaagcttgtaattttttcgtaaactcacttctagtataatgctctaatttacctgttagcactacagtcttatccttaaatggattatcttcaatttctgcaggctcatctgcacctaggtaatccatattcaggccgctctcacgcagctcatcaattaccttctgtgcttctggttgagcaaaatatgttgtcattgattccgcgatcgtcatgcctattgtatcgatagaagctatttcttgcacgtctagagacataatctttgccagatttttaaacttttgagcaattaagcgtgctgctttggccccaacatggtcaattcccaatccagtaatcaataattcaactgagttttgctttgaattgtctaaggcagttaacaaattattgatcgatttttccttaaaatgatcgagttgtgctaaatcatctgcagttaagtgataaagatcagccacattatgcactaaatctttagcaatcaattgtttaacgatctttggccccaaaccggcaatgttcatagctggtcgagaagcaaagtgcgtaataccctcctcaacttgagctggacaagatggattgatgcagcgcaaagctacttcatcttctaggtgaactaatttttgcccacaggatggacaagtcgttggaatctgataagctacagaatctgccggtcttttagccatgacgacttcagagatttctggaataatatcgcctgctttatgcagtttaacggtatcaccaatcctgacgcccttttcattcaaataatctgggttgtgcaatgaagccctagctacagttgtaccagctagttgcaccggatccatgaccgcagttggagtaactactccggtacggccgacagtccaaacgatatcccgcactacagtttcttgttcttcaggtggaaatttataagcaatttcccagcgaggcaccttaacagtgttgccgagctcttgttcaattcctagatcatcaatttttaacacaatgccatcaataccatatgttaggctgtttcgtttagctgtgtattcatcgataaaggcaaaaacttcatctaatgtttttaacttacgaccggtttcattggtatgaaagcctaaatcatgcattttttgaattgcttggtgctgactagtaatttcttcaggcggattaacccaagtataaataaaggtactaagttgacgcttcttggtaactttaggatcaagttgacgcaaagaacccgctgcagcattacgtggattagcaaaaactgctagaccttgctcttctctttctgcattcaacttggcaaaggcttccttgctcatgtaacattcaccgcgcacttcagttgttaacggttcaggcaaagtctgtggaatatcactaatatacttagcattagctgttacatcttcaccaacataaccgttaccccgcgttgaggcacgaaccaacttaccattttcatattcaagcgatagtgataagccatcgatctttaattccacgttatattcaactggatgaccaactaatttttgcatccgttgatcaaaatccttcagttcagctttggaaaagacgtcccccattgacagcattggaatcgggtgctctaccttggtaaaatcactatcaatctgtcccccaactctttgggtaatggagtcgggtgtcacaatctctggaaattctttttctaattcaagcaagcggttgtagctttggtcgtaaacattgtcttcaacctcaggcgcgtccttagagtaataggcctcagcccattcattaagctgttttctaagtgaagccgcttcttttttagcttcatcaagagtaatttctgccatttttccctcctgatccaaatcaatctttctttaattataccttcttaattggcgcaaaggcagccaaaagccgtttgattcctttaccagggaaagcaatatccagctccatatcttcaccagtgccattaactttagttacaacaccatgtccccaagctttatgctcgacttggtcgcctacattccagcccttcttttcagcaccgatagcgcctgaagctttcttagcagtataaacttcagcgcgagctcgttcggctttgcgagcaaatggtgccgtctgcttctcaaagctagattggataaagctgctttgtaatttttcattttcttctttgtgcagatcctgttcatcaatttcgtccaagaatcttgaaggcggattattttgcattctgccatacatcatccgtgagtaagcattagttaaaaacagttcttgcttagcccgagtaattcccacgtaagctaggcgccgctcttcttctaattcattgtcatccatcattgcacgttgcaacgggaaaagcccatcttccatgccaattaagaaaaccactgggaattctagtcccttagctgcatgtaaagtcattaaagctacttgattgtcatcttcatcaagatcatcttgatcgctaagtagagatacttcagccaagaagtcgcttaatggattagactcatcttcttcgggctcataatgatcatcaaaacgcttagtaactgacaagaattcatccaagttttctaaacgcgtttctgattcaattgtattttcagctcgcaaggcatcggtataatcaaaatcagttaagattttttcagttaaaccagttactgtaccattttgagcataagtaattgcatcacgtaatttagtaccaaaatcgcttaatttcttggctgctctagtattaattgaactttcagccacatgtcccatcgcatctaaaatgttgtagtgattttcatccgcaaatgttatcaacttatccacagtagcggcaccgattccccgctttggagtattaataattcggttcatactcatcgtatcagctggattagcaactaacttcaagtaagccatcacatctttaatttctttgcggtcatagaatttatgtccaccaacgatttgataaggaatattgcttttaacgaaagcttcttcgactgttctagactgagcattagtccgataaagaattgcgaaatctttataagcccgttttttatctttaacttcttcttggatctttgaaatgatgtagtgagcttcatcatcaccgctttgggcttgatagtaggttaccttttgcccatcaccttgatcagtccacaagttcttagccttccggttctgattatttttgatgaccgagttagctgcggacaaaatgtgaccagtagaccggtaattttgttctagcttcacagtcttaacatcatatttcttgtaatcctgctcaaaattcatgatgttttccatattagcaccgcgccagccatagattgactgatcggcatccccaactacacaaatattcttgtattgtgcagccaaagcatgacagagttcatattgagcctggttagtatcctgatactcgtcaactaaaagataacggaacttgttttgataatagtgcaaaacttcgctatcttttttaaacaaaactagggtctgcataatcaaatcatcaaagtccataatttgatcacggcgcaatctacgttgatattcttcatacaccttagccgccatcttctcaaatggtgacgatgcactctgcataaaagcttcaggatccagcaagtcattcttgccattagaaattgcggctaaaataccgcgtggatcatacatcttaggattgatattcaggtctttttcaatatgcttaaccaaagttaattgctcggccgaatcagcaattgaaaaattatgaccataaccaatcttatctgcatcccgacgcaagatccgcacacataaagcgtggaaagtcgacatccaaatgtcgttagctgctggccccagcaacttttgctcacgctcacgcatttcactagccgccttattggtgaaggtaatggctaaaatattccaaggtgcaacatgattttcttcaactaagtaggcaattcgtctcgttaaaacagaagtcttacctgaacccgcaccagcaacgactaataaaggtccttcagtggtttctaccgcttctttttgttgcggattcagaccagctaagatagatttttcgctcattattttccccttcactaaaaattatttcattaatgcaacttgaatattataccaaaaaagcagcgactaattcgctgctttagatttacttatcatatttttcaagatcaaactgttcaatcaaattaatcagcttatcggcatagtccggatcagtcgcatagccgtcggtaaccaaagctttagcttgtgtcttataatctttggatgctagaacatgcttatactgatcgtggttccacgttgtcccattctggaataatctagcgtgagcccgaatagaagcctcatatgagtcatatatttggaaacgcgccttcacggtaacccacttattctttacatattccttagttgtcatcactgccgaagtgttcgggttggatcctttaacaccaaaaagattattgtatttttgcgacaaatcactttgtccataattactttctaggcaggcttgagcaatcgtgatgcttggcaataagtcatacgacttgtccacttcgcgcgcaatcggaccaatttttttgataaagtcttttttctgttttaatagttttgctgcttcctgttctttttgcagctgtgcttgtcgaatctgctctgattgaatcgcgtaacgcctataatatctaaagccgacaaaagcaaccatcagaataaatagaattacgaatacacgcacaacggttttgacactttttggtactcttgatttacgttttcttgccatagttttattccctttaattactaattaaagtataaccgatttttgagtaaaaaaaagaagtcgctcactgcgactcctcaatcagtgcgggcgagaagactcgaacttccacgatctaaagcgatcacaagatccttagtcttgcgcgtctgccattccgccacgcccgcggcacatcaactataatagcctaaatacagttgagatgcaagaaaaaatataaattattttaaatttctgatcattttacgcaaaagtttgcgctaaacgcaggtgtcccctacatttaccacaacgatacttttgtgtattaatcctgcgcattcttggatatctcaacccacagttttcacaaagatataggtaacgatattttttctttttacgtaagccaatatcaggtgcataacgactgcctccaacttttttcagcaagattttaaaattgcgatcacggtgtcggtaacccaagcccaataaatgcaaatgatagtgggttaattcatgcttaatgattcctactagataatcatgatattgtggtactaaaaaatgcgcgttgatttcaagatggtgatcatccaaatgataacgcccacctgttgtggtcattcgccgattaatttttacacggtgcttaaaagggcgatcaaaatattttatcgaaatttcttcaactaaattttgtaattcattctcattcatggataaaattttattccaaaaataaaaatcagcaagaatttaatctcgctgattttttgctacctaaatatcttggcatacatccccgcctgcttaggcgtactaatgtgtcgtttcaagaaagttactaagtcatgtttgaatgactttttaccatccatccaggttccagtgaataagtgaatcgatttggagtccttagaaggattacacagaactccatctgaatagacatgaatgccatcttttaacacttgctcctgattacctagctttaagccatacttatttaccagcatttcagtaacggaaatactatttactcccgccatctgattcttagtgtcatattcaaaatcacgatcttgataataatccaaaatatcctgcataaatgggtggcctttttctgcaccaaaaattgcagctgacagataatcatggttttcaaaaccaataaaggcagaagcattcaaaagactatctaacttatccacgactctaacatcagtatctaaatatatcccaccttgttcataaatagcccgtgctcgaacatagtctgacacgaaggcccatttttttgcagcataagcttgttcaatataacggttctcatgcatatcaaaattatcttcattccactcaataatttgataatcaggcaattttttcttccaggttgcaatacattcttcaattatcggggatttaggattgtgtcctacccaaacataatgaatttttttaggaatcatttttaacctcgcttcaaaaagttcttaattagcttcacaatatcatcattaaaatcaagcttgaacaagaacatcaatgtcagataaataattaacatgacaattgacttaaaagccatattgaaaaaggcagacggaattatattaggcataaacattccaatagccaaggttagcaccgcaattaacaaatacttgggcacgtcatggaaaacataactaaattcatagccatcacgtacaacccagagccgcaaaattaaaactactgcttcagtaattaatattgcaatcatagccccaactgcgccatatggcctatctaagagataactcaagacaatttctaaaattgccccaataactactggcacagcataatccttgtctcgctggttagccaaagcaaattggttagccaataccccgccagtcggaatcatgataattgttaaggtaaaccaaaacattaatggagtcatcggaacatatttattaccaaagaaaaacggtacaaactgcttggtatttgccataataattacggcgaacaaggtacccagcattacagtagcttccagtgattttttcatcactatcttttgtgccttttttccttcgctcgccatcttaggcataatgactagcgaaatactggtaattacacccagaatcatatttgaaattcgttgtgaattgtcataaaaagaaacctgagtcgaattagaaaaccaacccaaaattggtttatccagcgaagtataaatttgagtcgcaatctgtggaatcatcaaagtaccaattgcaattgccgtctgtttaaatttgtaaaaatgagcaacgggttttcctacatagcgccaaatatcaagccaaaagacaaaggaacctagcattgtcgacactgacatgatcaataaatatttccacaagtcagcgggtgattttacccataataaaattagaaccacactaactaactttaccgccatgtttttcaaaacaacacgaccaaagtcagccagtccttgaaagaaccatgaaatatcaacctgtgctgagatcaagtatggcaccatcaacaagatataaaaccaatattgaacgtgaaatacagtcgctacaaaaaccgtgactaaaatggtgataataccggcgattccttggaaataccataacccccagaaagcattggttagctcctgcggtgtaccataagtgcgcgtccgtgaaattgttcgcatccctacatacgacacagacagaatacaaaaaatcatcaagaattgcactgtattgttcacactgctataaatcccataagtcttaggacctaagacacgcgataaatacggtacagtaatcagtggcaccaatacaataaaaatctgataaaccgcattatataagatgtttaaaaatgttttacgcattttaacctcgatattcctgcgtcatgtacttaaagacgttctcacaatatgaatcaccatgcacctggttagtcaaatgtagccagtaaagacggcgattagcaatctgctggttatcaagttgatccagattgcgaattagttcatcctctgaattaacacagattccgggagtaatctcagcatatggtcccattagtaatccgcgcgttttttcatattgctctaaaaagttagtcacaaacacaatcggtttgttcaagtgcaagtaatcaaagtagattgacgaaaagtctgtcatcaagaaatcagtatcaccgagcaattcgtacaaatcataattgtggtcaaacaagtaatcattgttcatgaaagcaatgttagaataactgctcttgaaattggcaaataagcgcatttcatagggatgcaattttacaatcagatattgatgccgcttctttaattctgtatttaatttttcaacatcaaaatcccgaaaggcaaaaaagtttctctctttgattttctccataatggatttatcttccaattcataacgaaaagttggcatatagatcccgatctgtgcctgatcgtcctcagttttaaataagtcagccaacaattgtttcttcgaaattaccggcttagccaataaatccaaacgcggaaagcccagcttgcggtatttttttgtctcaattgccatacaagcactcattagtgattcatatagatcagagctagaagcaacaatatccgcattcttgtgccacaatttttcgttacggcgattgtcgcgtcgcttagtattattagccataattcccatgcgcttgagtggaacgccatgccacaactggacattaatttgatgcttgcgcaccttaaatggttggtgcgttgtaattacatatcgcgctgctccgattttctgccaggttttccacttcaagtgtgacgatggccacggctcaactaatgtaacgttatattcaggatgattcaattgcagccacttgtaaaaagcatagccgttagatccagacctacctgaaccattcaggataaccacattattgttttccatcgtggtaaatctagccaaaaaactcatccaagccaaataaagacggaataaaaagcttttcattaaaatacttccttaaaatagtctaatacctaaagcatataaaaaaagcttgagcaaactcaagcttttttctttatttttgttaaactttattctttacccatttttctctggcagaatttaacaatttcaacaatcaaaaccatcaaaattccggcaattaagatgactaaccactgtggtccatcaagttcagtcacatcaaagaacttagtcataaatggcaattctaccgctgccataattacagcagcaatgataattgcaccattgaaccacttgttagaaaaagtatgcggtctaaaaatcgactgatgtacatacttggaattaattgcatggaacagctgaatcaagcccaaagtcaagaaggccattgtcaatgcatccccatgttgcaacgatggatcacccacatgtggaccgacatgcaaaccaatttggtatgcacctaaaactaaaattccttccaaaattccttggtaaataattgaactggcaacaccaccgctaaagaagttagacttcttaccacgcggcttgcgcttcataattccaacttccactggttcaacacctaaagcaatagctggcaaagtatccgttaccaagttgatccacaagagctgcacaggagctaagatatcccaacctagcattgtcatcatgaaaactgttaatacttcacccacgttacaactcattaaatatagaatggccttttggatattactgaagaccttgcgtccttgctttactgcttcaacgatcgtggcaaagttatcatcagccaaaaccatatcgctggctcctttagaaacttcggtcccagtaattcccatgccgattccgatatcagcttgcttcaaacttggagcatcgtttaccccatcaccagtcattgcaacaatcttgtcattagcctgccaagccttgacaattctaaccttgtgctctggtgaaacacgagcataaacgctgtagtcaccaacatgctgtttgaaatattcatcatctagtttatcaagttcagccccagttaaaacgcggctatcctgacctttttcaataatacctaggcgttccgcaattgcttgagcagttgtttggtgatcaccagtaatcattactgttctaataccagcactctttgcttcagccacggccgctttagcttcaccacgttctggatcaatcattccgactaacccagcaaaaattaaatcttgttcaacattatcagttgttagatcggtgtacaattggtcgactttcttataagcaagccctaagacacgtaaagcttgttgcgccatctgcttgttttgcgctaaaatattttgcttctgcttatctgtgatcggctctacttgaccaccattttcaatcctagttactcgctgtaacaacatatctggtgcgcctttgaccgctacaaagtattgctcgccatctttattaacagtactcatcaatttccgttctgaatcaaaaggcacttcttgaattcgtttgtatttttcaagcaagtcagttacatcaatgttttgatcaaaagcaaattgaatcagggcggtctctgttgggtcacccaataagtctccgccattttcaatcttagtatcattagccaaagtcattgccaataaagctgggttattttcgctaatactttcactattatcatgtaactttttatcatagaagaccttttcaactgtcatccggttctgggtcaacgtaccagtcttatcagaacaaataatgtctgtagcgcccaatgtctcaacagcaggcaatttacggacaatcgccttatgtttggccatcgtttgcgtacctagtgccaaaataatcgttacaattgctggcaagccttccggaattgcagctacagccaaggaaacggcaaccaagaacatgttaatcattaaagtagagttacgctctgctggatcagccttgagcactcctacgataaagacaataacgcagattgccaaaatcatgatggttagggtctttcccagttgattcaagtttcgctttaacggtgtatcagtttcatcagcattgttcaacattgtagcgattttaccaacttcggtgtgcattcccgtactagttacgattccttcaccacgaccataggtcacattagtattggaataagccatatttacgcggtcagctaaagcaatgtcttcaccttctaaagtttctgcatgcttttcaactggaactgattcaccggttaacgctgattcctcaatcttcaagctgtgggcttgattcaagcgtaagtcagcaggaaccacatccccagcttctagtaaaactacatctccaggaaccaattctgtgcttggaatagtaacgattgtatcatcacggcgcacatgcgcatccggcgtagccatttccttcaaagcatcaatcgcagcttcggaacgtgcttcttgaaagacgcctaaaattgcgttcaaaatgaccacaatcataataattgcggcatcagtccactcatgagctaataccccagacaaaatcgcggcaatgatcaaaacaataatcataaagtctttgaattgatcaataaaacgcatgaacatgctttgctttttcttggaagctaaggcattcggaccatattgctctaatctagctttggcatcactagcacttaacccatccttaacggacgtgttaagatctttttcaatgtcggggatcgactcgacataatattttttcgccattttccctctgctatataaaacatagaaacatgcagaagtttgatattttccacataccagaaaaaaatatatttttcctttcctaattttatttactgtcgtcatcattggtattccgatattccatctggggagtaatcgcattgaccaactcctgcagcttaagggtttagccagccccattatcttttattttgttaatgccaataaatttaatactgcattgtcatcacgatcattgctatagccacactcataacaaacatattcattgtgcttggtgccatgttttctattgccctgcaaagtgattttgtccgcaccatttttgacatagccgcaactagcacatctttgcgttgacgggtagcttctatcagccaaaattagctctttatcataccaagcacatttataggataatatctgtctaaatttgccaaacaaggacctctgtatgcctttggaagccacatgcgtcatcatcatttgcttgacattcaagtcttcaatgacgatttggtcataattatttgccagctcagtagtaaatttttgcaaaagatcattctgaatattgaaagccctgcgataatcacgctgaagcttggttctcacttgcacgtaattattgcttcggccagccaattttccattaactctttttttcttggccaatattctctgataatgcttgatccgcttgtacagtttctgcagtcttgccggcaaaatattgattctgccctcagtatagctgaagtgcccaacgttgacatcgatggcggtctttttgccagttttaacctttattccagctttttcttcgtaggaaagagcagcgtaataatggcctctttctctaaagatgctggcaattttaacctgtttcatcctcaatgcttcatatgttggaatatcaaaccatgatttaatttctctgggcttatccagtctgagcttgccattaataactttaactcggtcagtcttaaaaccttgacgtggagctttctttgacttgaaatgcggcttgccccagtcgagctgggctttgtcaaaaaagctcttccaagcgttggccaagtccttgactgccaactgcagacaacgagcagacaaggcaaactgccaatcagccttgttattgactaattcatctcgcacccgacactcattaggactaggattattatccttatttaaagtccgtgcttcatacatatcttgccaggtttctaaggctagattccagcagtatctgcggtaatcgcatagacggtcaagttctctttgcatggtcttgtttggttttagctcagctacctgtgttttaatcatttatttcacctccaatgcaaacataaatttagcaaaggatgaaacaaaaacaagcgaacaaaatattaaatttttagcagcagctaatttgtttctatgttttatcttcctgatcaaattaactgcatctttttctatttattgctatcaaatcctatcttttagtcaatcattatttcctcctcaaaaataaaaaagagacttacatgcttgtagcacataagtctcacgaattaagataaatccagaagtatcttacttcggctgttggattcatcgcaagcaattgctgttactcccttatgacaagttaattataagcaaaattttagctatctacaagttttagcgaattgcttttactttttataaaagtcatcaaagacagtaactggcaaatgacgcttgtgtttactcttattccataatttttcaatttgatcagctgttttatctgatacttccttaccttcaaggtaatcatcaatctcttggtaagttacaccgagggcaacttcatctggcaaatctggcttttcttcttcaaggtctgcggttggagccttttcatataaatgcttaggacaacctaattccttaagcaaagccttgccttgacgcttgtccaaacggaacaatggcgtcaaatcagcggcaccatcaccaaacttagtgtaaaagccactaaagttttctgcagcatggtcggtaccaacaacggcacccttattagcaccagcgatggcatattgaactaccattctttgccgcgccttaatattgcctttgttaaagtcagtaatcttttgaccagttgcttctacaaccttcaccatagcatcaactggttccttaatattaacaattaaatcctgatctggcttttgaaaagcgactgcatctgcagcatcttgggcatctgcttgaacgccataaggcaaacgaacagcgataaattgataagaatcatcgccagtttcctcacgcatttcttcaattgccatttgacacaatttaccagtcaaagtggaatcttgaccaccagaaatacctaagacgtatgacttaagaaatggattagcctttaaataatctttcaaaaaatcaattgaacgtctaatttcttttttagggtcaatttctggtaaaacatgttcataagcgataatttctttttgtaattctctcatcgaccaatgcttctttctctaattttacgccgaatgtcttgaatcaaatccatcttggattcgtataagttttgtgataaatccactggatattcctgcggattcaggctacgcttatattcatcccataaaccatcaaggttgtcagcacagaattttttaatttcatcaagactaggttgatcataaactaattttccatctttaaaaatatcatgtaaaagtggaatagcagtgtaatcagttaccaccttattaatatagttatattgtgggtggaacatgaagagcgcgtcaaatttgcgtggatcttcattataccgagatacccagtcaccttcatttttcttagcagtgtttgcgctaatccgccatacttgttttttacctggggtggaaactttgatggcatttgaagaaatcttcaatgtatcccgcatggcgcctaattcatcttccatggcaaccaacttgtaaacagcaccaagggctggttgatcataagcagtgatatacttggtcccaatgccccagacatcaattttagcgccttgcatctttaagttagtaatggtgttttcatcaaggtcatttgaagcaaaaatcttggcatctggatagccagcatcgtctaactccttacgaacttgcttagaaatgtaagccatgtccccagagtcaattcgtacgcccaagaagttaatcttgtcgcccatttcattagccaccttgatagcattaggcacaccactacggacagtatcgtaagtgtcaaccaaaaaaacacaattcttatgtgtttccgcatatgccttaaatgcgtcatattcactgccaaatgcttcaactaaagcatgagcatgagtccctgaaataggaataccaaacaatttaccagcacgaacattactagttgaatcaaagccgccaatataagcagctcgagcaccccaaatggccgcatcggtttcttgcgcacgacgagagccaaactccattagaccatcatctttaacagctaacttgattctagcagctttagttgccaataaagtttggaagttaataatatttaaaatagcagtttcaactaactgacactgggcaagtggaccttcaacttgcaaaattggctcgttagcaaaaaccagctcgccttccttcattgaacgaatagtgagctttaattttagattgcgtaaataatcaataaagtcatcatcgtaaccttcattttctttcaaatattgcaggtcactttcggtaaactttaaattctttaaatagttaatgatgtgttccaaaccagcataaacagcataaccgttgccgaatggttccctgcggtaaaaactttcaaaaacggcattgcgatcagcaatccctttcttgaaataggtatacatcatattaatttcgtataaatcagtgtgtaaagccaacgaatcgtctttggctaattctggataaaacattgcttctctttctgtcattaaaaattaacaatttcgtttttcattatacagccattacagtccattggctattctcaaaactatttttacctcaaagttaaatacactttttcaattgagtccagttgatttttaatagaaaaatgctcttccgcataccgcttttctgtattagccatctggcgtaactcttcatgggttttattaacggccagattaatctctttagcaattgaatcaatgtctcccgttttagcaatgaaaccatattcgggtcctggaatcattttatgaatatcacctacatctgtggacaaaatagggattaaattgtctgttgcctctaaaagcacaagtggaaaactctctgaatatgaagttaggacggctagatcaattcgcttatataatccgctcaattggtgttgagtcataaaaccgtgaaaagttacttgtggtgccatgtccaattgccgcgtcaaggccttcaatgcttcaagctgactaccatcacccgcgatatgcagacgaatatgctgatcatctaattttttcacagcttttaagagcaattcttgtcctttaaccttttccgtacgagcaacgttaataatattaaaataggtatgttcatatttagctggaatttcactatcactgtggaaaaagatgccattatagatgacatgtaccttgtttttatccacatgtgcgcgattaattagtagcctggcaaaacgctgagttactacgaaaatacaatcagcttttctcaacgcacgtaaattaagtttagtaaaaatattgccaatgattcccctaccttcaaagtctagataaggatctgaatgtacagtaatacaccaagctgcacgaattcgcttgtgaatcaaagataaaaataagttggcacgcgcaccatgagtatgcacaatatcatagtgcccctcattgataaacttagtcagtctacctaaactgcctaagtcataacgactattagctcctagcacatgtgtagtaatcccagccgctcttgctgcttgtgctactggtccttctgccagcgttaataattcaaaatctttgccttcatttttggcttcagttaacaaattaacaatatgtgataaaccgccgccattttctaaaccagcatttacatgcaaaaccttcatcttagtaaaattattttcccttcttttttgactgtttaactcgcacaacaaactgtggcaaaactaacatccgcttaaatctgctaggattagtaatcaagcgataaaaccactctaaatgcgtcttttgaaaagcttctggtgatcttttaacgatacctgaaaagacatcaaaactgccacccacacccatcatcaaagctggtgtttcgttcttacgtaagattgatagtagtttttcttgcttagggaaacctaatgctgcaaaaaccatatcgggttgtgccttctgaatgcgccgtgccactagttccaaatcttcagtaaagtagccgtcttctgcaccaactagattaatatttgagtattccttagcaattttgctttgtactgcatgaattacttgtggcttagctccaattaagtaaactcggctaccacgatcgttagcaacatccatcagccaagtaaacaaatcatatccagtcacccgctcaggtaacggctgcttaagcattttagctgcttttacaatgccaatcccgtcagcagtaatataatcgggatcattttttagaattttcataaattcaggattctcgtttgccgccatcacaatctccggattagcggtcacaataaaggtcgacaggtgattatttagtcgattaataaattcattttggaattggttaaaagttttattatcaaaatcaacacctaaaatattaactttgctcattttcacacctcatgcgttttcttatctagtttctattctaccattccgacacgcaagtacgagaaacatgttgtaagtgtcaatgtttttgcggtagcctttaaaccattagtctaaccttaatttcttaaatatttatatgacttaaatttctgcttagcttgcttaaataactattgccagctacctgtgcggttaatgcgccatgctggatgcctaaatgaacttcatgacgcttctttaagctgtcacgggccgctgcttttaattcctgttcagtcaatacagttatttctgaatcttcaaactcgctgctaagccaaaattccagctctcgattcttgatgcagcttaagatcctaagcatgccttctgctccagattttgaccatttcttgccttgccccttaacacggtaggtatacttgcggtggttgctctcgcagcagccaatggctttagtcacagtcagttttcgtttcttaaacggcttaatatcgtcccaatgacgatcaatataattccttaggcgccccagataatcatgattgagctcggtattcaattcatcaattagtcggctttctgcagtggttaggatagttttaactttgtcatagctgtatttgtattccaaagcagaaatcagcttgccttgcaggtcaggcgcaaaatatagcctttctttgattttcttatttaggtgaaagacatccaagaaatgctcatgacgcttgcatagccctacaatgtcatcgaagtctgttttggcatatccagcaccgccatcggcgttgctaagaattacagtatcagaaagatcataagtattggccaggtactccttggcttcgttcagcgcatcaagtcggcttaaagaaacaaattccttggcattgattcgctttctgcgtttcttgcttatattgacaatgccttcacagacctgatagcgatgaaattccaaccggcttttagtgcctttgatcaccacgccatcgccttcaagatacaaaactgggacctttttcttagtgcctgcggcatcatatcttgaatctgcttcttggcccgctttaatatttttcccggccatttttaccaaattgcccacctgcatatggctaatattaaagccagacaggcaattgactgctagagcagtattgcgataagtggcaacgctgcttacttctaagatgtttttgactgctaaaatactgtagcgcttgtatttgtcaaagcccattaattcatccaagggataccttgcttgtttgcctgggcagacatatcttcttctgacatacctaacttcgccaaaagccatattgattgagcgctcattcttcttatcaatctgatagccctgtgctttaaccttggtaatcatttcatcatcaactttagctaaagccaagaccatgatttccttaatcaggtttaagaagaaacagattatttttctttcacgcttaatataattatcttcagactttataatatttgcgatttcagttacaattgaattcataaaagaccagcttctaatgtgttttttgttcttaacatcagactactggtctttttgtttgagctcaagtccaaattcaaaggacttgggcttttttaattatttattcaacttaccgtaaaaaattatacacttagaaacatgttcaagttttatattttattcaaacatgataagattgttttaataaaggagaaaaaatgaaaagagttattacctatggcacctttgacctacttcactacggtcacgtgcgactgcttaaaagagctaaagaattgggcgactatttaatagtaggtttatctaccgatgaatttaacgaattcaaaaaacacaaggaagcctacaatacctaccctgaacgtaaatacattttggaagctatccgttatgtcgaccaagtcatccccgaaaaggattgggatcaaaaaatcaccgatgtacaaaaataccatatcgacacttttgtcatgggcgatgattggaaaggaaaattcgacttccttaagccttattgtgatgtggtttacctgccaagaacgccaggaatttccactactaaaattaaagaagatcttaaataaaaaaatactcccattccattcaatttgaatgagattggagtttttgtttacttagaaaaagtgaattcaaatcgttctgcaacgtaacgtgcgcgggtgtattcgaatggttgcccatctgctagttcagttacctgtcgtctagtaattaacggttcaccttttttagctttaagaagacgcgcatcttgctcgttggcaattgatgcagaaatatgttccgtcactcgtccaatggcaaaaccaccgcgcttttctaaggttttatataagtgcgttgaaacatcttctttagaaaaattctttactaagtagtatggcaccgttacgacttcataacaaattggtgtcttatcagcgtagcgaatccgctccatccgcaaaacgttctcattatcttttagcgcaagacgctctttttcagataaagatggattgccaatctgataagaaattaacttacttgaaggaacttgaccattagccttagtaatctcagtaaaggacataattcctgacattttttcttgaaccttttgactagctacataggttccgctacccaagcgccgttctaaaattccttcatcttctaatgttttaatcgcttggcgtaaagtcattctcgaaacgccaaacttaactgccaattgacgttctgctggaatacgatcccctacttgataaacgtgattctcaatatcacgcttaatctgattgtgaatcttgatatacatcggttcttccatagtcgccacccccaaagtttagtactgctattattataatctaaattggtctagcttgcattaataacactgcttcaattttacagactattttttcttagcggtccacttcactccaagaatataaacatttggacgcttgttatattccacttcaacttgttcattatcattagcaactacactggcactaaattttgcttcatctttaacagctaagttagcctgattaggattcagcacaatattgtggcccttcatattagcttcaccgctcaaagctaaaaagtactcatagttcatatttccagtgaaggtaacacgtgtagcatcacatttcgcctgatcttgaaaatctgcatgagctaaaattacggcattgttcattgtaacttttgcttcatcaactactatcattcgattgatggttgaattttgaatgattgtccgtgtctttttatcaatataaaccccacccaaaaaagtagaattcataatattgctccagcagtcatcacttaaataaaggcaggaatcgctagcagacttaacttttgaattaagcatattcatccaagtttgcccatgcagtaatacataatctacttccgaattattaagatccaactccgcattcgttttggcaaaagtattaatactgccgtgaatctttgaattatttacaattgctgttccttcgccttcaattgccaaagcacaatatttgtccgagaaataatcaatttctgaatcattcatttccaaacggaaattggcatggtcatacatggaaactgaaccgttaacaattttggttgaataaagttccaacgtgatcttaccattaaccgcgatagctgctgtatcagttcccgtgcccttaataaagcaattacgcaaagttaaatagccatcaacgcctactggtacagctaggctattatgttcggtagttgtatcaatgcataaattttctaaagttacataacgactatcttctgaaacactaatatagccataaatagtcgtgtcttctggcaaagagcctgttcccttaattgtgatatctgttagtgtaatgccctgcggcaaataataatatccggggcccagcatcaacacatcatcggcacgcaaatcctttaaagcctcgtgccaactgactgaactgctagatccccctactctaattatcctagccatccattatcctttcatctcgtaaaaaccgattactattgtactaattttcttcaatttatgttgtatttttgctcatcaaaaaagctaggttcgattcctagcttcttatactatttcattttaacattccagtaataagccacattaccataaggagaaagttgaaaacctttcactctcttattcaataagtatgacgtaccttgttggaatagtggtgccgcaaaggcatccttttgaattaattgtttttcagcgttaactaaggcattcaatctcttctgcggatcagtggcataagttgaacgagccaagtcaatttgcttccagaagttagcattgtgataatctggcgctaaattaaacaaaccaccaactgtcaagaaatcaattggatcttcataacttggctgccaagttccgtaaacaaagtcgtaattgtgattagttgtgttagatagccgtgacttcaaaggaattgaccgtacccgtagagttagaccaggtaaatttttcatcaaattgctttgaataaattcacccacacgcttagcatcgtcaatatctgaagtaagcaattctaaggttagcttcttcttacccaattgcttcaaaccaagttgccattcctttttagcttccttggcattataggtaaccaagtcgccagcatccttgcggtaatcgttgccagttgcctgatcggtaataaagtttgcggcaacaattccatttgacaccttgccttgatgcaaaacggtcttgactaactgttgcttattaattgcccggctaatggcccgacgaatatgaacattgcctgtactcttacgcttcaagttgaaagaaagataaccattagttggcgtaactttggtatgatagctagaattattttgatactgcttaacaaaatcagaagtcaatgtcgtgtaatcaagttcaccacttctgaataagttaaccccagttgaaggagtttgaaccacttgtacgttaactttattcaaatcaacaattttcttgttccagtaagttggatttttcttgtaagtccacttcaaatttgaacctgtccaaccagatacggtaaatggaccattgtaaactagattcttactgctagtcccatacttagagcctaactttttaaccaatttagaattctgaggatagaattgtgcaccctctaagatttgtggcaaatatggaattggattagctaatgtaacttgcaccttatacttgccgagtgctttgattcccaatgaatttaccggtgctttaccttgagaaattgcctcaccgtttttgataatggcataagaatcggcatctaaagatgaattttttgggtcaacggttctgcgccaagccgttacataatccagggcagtaactggatcaccgttagaccacttagcattattgcgtaaggtaaaagtatagaccttctggtctttagaacgttcaacttttgtcgcaccagctaattctggctgatttttcttattaaaacggtaaagaccttccatggaattctgcaaaacttctgaactagtcgtatctccatacttgctcgaatctaaagttgaaatttcatttgtgacagaggtattcattgtcttagtcggtgcagcattactgtcattgttagagcaagctgccagcaccaatgcggcagctgctgtcatcactcctgaaaaaatccattttttacgtctcaatcttctcacctttacttactttttgtttaatacttacattttacaagtatatctaatacggaagaaatttcaaatactttttccgtataatagctataatcaatacgtatacaaaaatggcaaaaaaagaaacgtcacataggacgtttcttttttcgggttgggtgttcttttagaactattgggttagctggattcgaaccagcgcatgatggtaccaaaaaccattgccttaccacttggctataacccaataccagctgaactttttacttgtcgttcaacaatggaggagggtggattcgaaccgccgaactcagagagagcggttttacagaccgccgcgtttagccacttcgctactcctccgttagctgacttaattataataacgaaaatccaaatcaaatgcaagacttttttgaaacttttttcaaaaaaaagaagaagccatgacgacctcttctcaaaatttaaaaattgatttatatctaaacagttaattttaagcctaatgccttttgtgctacttgatttaccagactccattgcttgtcataagttggtgaaaagaagaaatctgcttctgctaaatcttccagtgtcaacttatttctaatagctaagctcaaaacattggcttggccactaatgtcatatgatgaaagtacgctaccgcctaagatttggtggctgtcttcattataaacaacagcaatatagcaagtaggattatctttttcaggaatatagtctggacgaagataactctttaagactgtttcttttgcattaattcctgctcgcttggcattcttttcactgagtcctgttgttactgcatgtaaatcaaaggcttcaagcaattgtgcaccaactaagcccttaaagacacgttctggcttgtcttcaaataagtgctcaacaacatattgagcctcatgccgtgcagcaatggcagatggcatcggtactcttctgttagctggaatgctaaatgggaagattgcatccccaattgcatagacatcctttacattggttctaaagtaattgtctaccttaatgtagccattgtcataaagatcgatcgtgtttttcaaccaatcagtatttggcttaataccaactgtaataatgacacaatcagcagtaatatcacccttatcagtctgaactgcattgacctttccattgccaacaaagccagtaactttagtgttcatagccaggttaacaccatgatcagtcaattctttttcaaataagctagtataagtatcattcaaataattttctagtggtttttgcccaccgtcaattaaagtaacattcttgcctgctttagcgaaaacctcggcagctgcaattccgttaccagcaccaataactgcaacatttttaatagcttcatcttgagcagctgcattgatctctgtagcgcaatcatagcctctcatcaacataatatttttcaggtctgctccaggaagaggcaaacttgcggggttaacacctgaagaaataattagcttatcataactaacttctttggttgtaccatcttttacgtttttgacagtaaccgtctttttagctggatcaagagctgttactgctgtgttattaacaactttaccaccccgttcagctagatcttcaggagtaaagtttctaacgttgtcttggcctgtagtttttccttcaaggaatagcttcattccgcaagacataaaggaaacgaagtcgcctgcttcataaatcgtaacgtctacatcatcataacgatctaaaatttcataagctgcctcttggccgccgtgggatgcacctacaataatgattttcttttttgacatagcctgacctcctaataatgcagcaataattgtcgtttttaagtaatagcagttattgtaactggttacattatttatcttttaataagatatttcaattaatttgcttttgattagtgcgaagcagcaatatattttttatataaaaaagagcactactgatagtagtactctagagggaaattttccaaaattatcttatttagctaattctgctgatagatttcgttcactaatttagtgatttcattacgattaagaacttcatcatacatatccattgtttcctggattgtattttctaaattagtaccatgatttttggcatagccaataaacttttttgcatctactattttagcttctttaatcgctttttctgcagctcttttagcaacttcattcatctcatattctagcttattcatgtcttcgacccattttccgctattcacgtagtagtcgatatccttctgcaggctgatatccctgcgtagtacatcatccgtttttctagatcatttttacgtgttgtttgcatctcaatatcatacactcgactttgatcatcttgtgcccagatatctaagcgaatgttttgggattctagtccaatgttgccgtcatactgggtaatgacattaacttttgtcaattttaattcaggaaacatccgacgtagcagttccagacaattctttttattgctcataacatgaccgaataccaagtcgttagtaattcgaggatatcgattaattcttctcctcatattttacctcttttctttttcttaagtaggaaaattaccctccactatttattacgcaaaaaagtgcaaatttttttcagaaatttaaaaatttagacacgaaaaaagccgatgcaaatgcatcgactctttcagttaaattattctactttttaatagaagtttacagccttgatgtaacgcttgttgttgtttctgcagccttcaattctgtagtacttcttaccgttcttaaatctcatttgaccaccgtaagtagttacagtttgacctctgtacatcttaccagtacctggagtacgacggtatgatgaccaataaatgtaggcattgtgcttaaaagtacgttggttaccagtaatgttggttacacgaacgtattcgtccttgttagccaccttgtagtaagtcttaccgttgatagttacaacagttggaacgatttcaatgtcgttgtaagcgtagtacatgtgacctaagtagttaccgttcttgtcataagctcttgaatcaaccattactggcaaagtcttggtgttagtgtcaccagctggcttaacaagtgatgaagtcttaacccaaatgttgcttgagttagcatctgacttagacttagttgaaacttgtgagtatgatacattgttaagggttctagtttgatcagcaacgtaaacagtgtcaccatctttgaaagtagttgaagctggtcttacattaatgccataaatgtggtaagttgcgattgagcttgcgccattagcatatagagcttgtttgtggcttgaagtaattaaaacagtgtatgttgcagtagtcttcttaccagttaaaccagtagcagttaaagttacattatagtaacgtcctgcttctgaagtattaacaggatttgaagttgcttctagtgaagcagctgtattattattgctgttttgtacagctgaaataataactggctcaccattactatttacaaaattagttggattaaattgtgaaccaacagctacttggaatatttgaccattaacactccccttgctttgaccattcaatgaccaattgatcactggattttgagtagtatctgtagttgaacttgaacctgaaactacaactgggatttgaacagtagctgtttgcgtagaagtagaacctgtaccagttaaagtaagattgaaatcactagttggtaccgcagtaatattcttgttatctttatcaagagttacacctgcattcttaagaatagcagcaacttcactatctttaaggttaactttttctccactggcattattcgtactaaagaaaactaatcctaaatcattaattgccttagtaacactagctacagtatctttagccttaatagaaatagtagttggtacaacattagctgttttatcggtagtacttgcagcatcaattacttgattgccatatgtaaagtatgatctatctgttggctttgctgttgttgctgtagtagtacttgtagtaccagtagtgttagttactgtacctaaactaatagcagcgttaactggaacagctgaagctgctacaggagcaactgccaacaaagcggcagcagccatacttacaattcttgtattctttctcataattatgtggcctttcctttctgaaacagaaattcatcctaagcagtaagttatatcttcttctgcttgtgaaataattatagcatgttacgaacccgattactaaaaacaggatcgactcgtgtgtgtgattttaagaatacctcctaaaatcaccagtaataccctaccctttatttgttaaactgtagttaccggacttttacaattaagattcaaaacattacatttttgtgaagttttaaacaagttattgatttatgacagaacttatgtgtgttaagaaaaggtaattttaacacttgttcgcttaaaaaaattaaagctcttagattttttgattagaaataattgcttcatgttctttaatatgctcaactcgccctgcatcccccgcaataagtaacaaatataatgcctcaatcattgtcatacttgccacgcgtgagaaataatactgcgattgcatcaccgtctgccgcactgctgtctttaaatgcacatcagctaatagcgcaatcggtgaatcatcgcgattggtgatcgcaatcaccggcatccctttttgtttggctaccttaatttgcttaatgattcccgctgcttcacctgaattcgaaatcaccaacaagcaatcctttttactcaggttcattgtctgcgcaattgccgtttcaatcgtgccacctgaatcaattgccaacaagccaatctgattaaacttatacactgcatcagcggccaccggataagtatcgccctccgcactaacctgcacaattctgctttcagtcaaaaaatgcagcacctgatctaatttggcttcagtcacattctccaaagtcgccttaatctcggcgactttatttttttcaatcaattccaaattagcactagcatcatcacgtgacatattttgaagtgacacactttcagttgcattctgagctagttgaatttttaaatcatgaaaacctgtcaaatctaaattatgacaaaaacgcgtcaccgaagcatcactcacctcagcttcagttgctaattttgaaattgtataatttaccacctgttcgggctgttttaagatcacttgagcaatcttctgatcactggctgacattgtcgctaatttactatagattgtatcgataattttagtcattattctcaccttttctgtgccaaaattatatcatcaatgtaattaattttcacaattttatttttaaagaaaataaatttatattttgattgacgaaaatcatttaccaaggtagtatgtatttgtaaataattttcacaggagaaaataaaatgaaaattaattcgataagtgacctcgctttaagtaaaatcaagccgaaaatgactatttctcttggcggcggaagcaatgtatttaagttatctcaagcgattgcacagcataacttagacatcacattatattctccatccgaacttactcgctttaggtgcaaagaactcggattagagcttcttccatctactgcagcgactaagatcgatattgcttttgatggttgtgacagcattgataagaattttaacgttctaaaaagtttgggtggaattcatctttttgaaaaacaggcagcacaaattgccaaacagtttatcctactcttacccagtcaaaggatacaaccgattctgaatcctaaaattccactttgtcttgaagtggcaccgccttgtgttaatcaagtacagaagtatttaagcagtttacatttaactagtaagattcgacaagatagttcagtagctgcatttgcccgtacgcctttgggcaactacttaatcgatgtttttaacgaagattggcacaatatcactgaacttaatcgtcaactttgtttacaaaatggcgtagttagttcttcactatttgaaaacttaactacttcattaattactgaaaaagacggagaaattattgaacttaagagaggtaataatcatgaaaacatttaattggggaattattggtactggctggattgcacatgatatggctgatgctttgaacaaagtcaacggcgaaatttatgttgccgcaaatccaaatgaagaagcactccgtgcctttgtccaagaaaaacatgtacagcatgctttcactaatcctgatgaaatgattaaggatcctagcattgatatcatctatattgctaccccacacactttccactacgactacatcaaaaaggccctcaatgctggcaagcacgtcttttgcgaaaaggcaattaccgtcaatgcacagcaatttgatgaagtggctcaattagctaaagagaaacacctaatcttaatggaaggttttactctttatcacatgccaatctaccaaaagatgcaagatatgattaagaccggaaaatttggcgaaattaaaatgatccaaattaattttggctcactcaaggactatgatccgcagaatcgcttctttaataaggagctcgctggtggtgcattgctggatatcggcggctacgcaactgcttttgccattagtttcatggatgaatatcctgaaagtatcaataccacggtaaaattctttgaaactggtgttgacgaagaaagcggcattattttaaaaaattcgaaaggccaaatggcagtgatgtcattatcgatgcgggccaagcagcctaagcgcggactggtttcgggcaccaaaggttatttcgaaatcaatcaatatcctcgcggcactgaagctgatattacttacacccagagtgctcatgaggaaagctatgataaggttactgccggggatgctgatcaggcgcttgaatatgaagtcactgattttcaaaagtatattgaacaaggccatgacgaaggcgaattggaaaaatcgcggatgatcgctcacattttaaccagcattagaactgcctggggcatgacttatccatttgataacgaggaataattagttggatttcaaaagggatcgatacataacatcggtcccttttatttgcacttattgcttattttctgcgacatatttttctagtcgtttcaagccttctttgatctgatccatcgacgttgcgtaagacaaacgaatatatcctgctccacctttagcaaaaaatgagcccgcaattacagcaacatgcctcttttcagccaaatcataaataaacttggtatcatcttgttccaagcctgctggaattttggcaaaaatgtagaaggcacctttaggcttaacgcattcaaagcctaacttggttaatccttcataaagcacatcacgccgcttttggaattctttcttcattggttccgcatcgttcattccattgcctagtgcttcttcagctgcatcctgcattggcgttggttccgtcgttgtgattgcttggtgaatcttagccagttgatccaaaatcggcttaggcgcagctaccacaccgattctatagccagtcattgcccaagcttttgacacgccattcattaaaacaacttgatcatgtaaagtcttttccatcgaagcatgtggctgatcataattgagctcactataaatttcatcacaaagaacaaaaaccggcttatctcgaacaacatctgctaaggcatcaagttcatcttgtgaatacatcacacctgttggattggtaggataattcatgacaagcgccttaacgcgatcaccatacttgtccaatgctgcttgcaatttatccggcgttaatttgaagtcatcgtcagaagtgtcgatttgttcaaccgttgcacccatggatagggcatccccaatataaagcggaaaaattggtgttggcaccaaaacaacgtcgcctggattaagcgccgcagtcaaaaagtcgtagatcgactccgttaccccattggtgatcaaaatttcgcttgggtcgtatttttgtccatatttttcagctaaaaaatcggctgccgccttgcgcaaacctggagtcccgttagatggcgcatagtgtgaatggttattagcaatgctggcttcagccgcttttttaatatgctctggcgtgttaaagtcaggctcaccaatcgtgaatttgacgatgtccgaaatcttgttggtgtaagctgcaaaggccaaaatctgccctggcttttgttcaaccaagccttttttcatatgttttgttaagtcgaccatagtttttcctccttatatcgaactaaatcaattcaaatataggagtctttttaatctttgtcaaaggaaatattaattttgatatctaaagtgcacattaaatccaataattaacaaagcataaatactataaatagccgtaacagtcggatacattgcctgatactttatcagcaaaagaataattaaaactatcgccaaaacaatcgttaatattctaaaacgttgaaaatatgacaaaatcggtaaagccactgtcaaaactatatcagttattaagatagtaaaatccaccggatatgatttgatataaaaaaactgaaatattggcaatgcttctaacagtaagaagatataactaataatcccacatattaaaagcaactgattaagtatctttttatagtctttcattaaatcaagaacttctcttttttcatgtaccagtgcttaaccagagtggtcaatgcaatgtacaaggtcaaaagtacaagaactacgagaacataatattctgggatcggaccgaatttcattaccttagccaagcttggaatgtaaggcattgcagtaccgatcaatcctgcaccgatcgtagcgagcattactacgcctgaagagtgctgttgtaagaagggaattgctggatcacgcaatgcttggataaccatttcctgtgtccagagtgattcgatgaaccagccactccagaagatggccataaagacagccttttgccctggagtagcagccacataacttgtgcccacagtacttggacaaatccagaagtaaagcaaggcaaacgtaatgatatcaaagattgaagatgtcggaccaaagaagaacatgaacttaggcaacttctttgtctcccacttacgtggtacttccaagtatttttcaccaactctatcaaatggaagtgacaaacaagatgtcccgtagatcaagtctagaatcaacaattgcattggcagcattggcaagaatggcaagaatgatgatgccactaagattgacaaaatattaccaaagttagatgacaaggtaatcttgatatatttcatcgtgtttgcaaagatctgacgcccaattcttacaccatgttccaaagtacgtaaactcttgtgcagcaagataatgtccgcactcttttttgcaatatcaacagccgtatcaactgagattgctacatcggccttcttcatggctggcgtatcgttgataccgtctcccatgtaagcaaccgtgtgaccattttccttcaaaatctgaataattctagcctttgactctggtgaaagctttacaaagaggctacattcttcaaccatctttttaacttcatcgtcgctcttaccagcaaaatctttttcactataaatgtacttggtgttcaagcctactcttgaagcaacactcttagttacagcagcgttatcaccagtcaaaatcttaacggtaatatcgtcttgctttaacttcttaagcacgtccttaacatcatccttaggtggatcaaggaaggccaagaagccagttaagatcaaatctttttcatcgctaacattgaattcaccggcttgagcaggattgttcttgtaagctaacaaaacaactctcaaaccatctttgttcaaatcttcaatgtgctttaaaactttttctttgtaatcatcagttaaatcgttgatgtgactgccaacttgcacacgattgcagcaagcaagcatttcttcggcagcacccttagttaccaggatacgaccatcgccgtggcgcttgaccacgacactcatgcgacggcgcttgaagtcgaatggaatttcatcaaccttagtgtagtcgtgtttaatttcattaacatctagctcatcgctagcggcatcgatgatggcttggtccatcaaatcgtgcatccccgtttggaagtacgagttcaagtaagccaagcgcaaaacctgtggattttccttcatatccaagttgtagtgccgttccaatacaaccttgttttgggtcaaagtaccggttttatcagtacaaagcacgtcggcggcaccgaagtttgggatggagttcatctttttaacgatggtgccgtgcttcgacatttctagcgaacccttaaccaaattactagtaacaataactggcaacatttctggagttaaaccaacggcagtagcgatggcaaacaacaaggcgttgagccagttacctttagttaaaccgttgatgaccaaaactaaaggtgcaatgatcgcggtcattgttaacaataatttagaaatgttcttgataccaacatcgaaattagtttccttaacgtcgttgtttgaaatatccttagccaaacgaccaaagacagtttgttcaccggtggctaaaacaacgccaacacctgaacctgacacaatagttgttccttgatagattacatcaggatagtccaaatattgatccatgtctttttgatcgggcctcttagtcgcaatcttttccacaggcgttgattcaccgttcaaagaacttgatgaacagaacaagtctttagttttgagcaatctaatatctgctggcaccatgtccccagcgtggatattaataatatcgccgacaactacttgcttggtagaaatttcttcatccttttgattgcgacgaatattggtagttacagacaccatatttaagagggcttcaactgcgtcattagttttcacattctggataaaggatgttaatccagaaataatgatcatcgcaatcataatgatcacagtactcaggtccttttgatctgccggcacgaagacgtagtcggtaaacagcgacaccgtcgctagcagcaacaggaccattgtaaaaggagtgaagaatgattcaatgaagaaatgcaatttcgtgttgtgcttcttggtagcaacttcgttaagaccattcttctccaaacgctctttagcttccgccgaagacagaccgtctagcgaactatgtagcgtctttaacgcttcttcgggagtttgcctagcgatctgcttaacaaactctgtatcggctgtcttcttattaatcagcaacttgttttttgccatgttaatcacactttctgattaaacacgcaaacaaactaaaaaggagccaataccaattagtattaactccttatctaagcgatgtttcctcgtcgttcagttttgacactacgtgacgtaagcacaggctagctatctggatctcgccttatctcgacaagaactattttactcgttggcatctctggatgtttccgggcgatagcttgtgttcacgtaggagcctcacctaacagtttatttgctttttcaattttcatttttattatatgcatattatttgacaatgcaattatctttactaaatcgttagaaattgtaaaagaatttaagaatgataaaaaacacgtgtttgcaatgaacacgtgttttttttataatttaattttgatatactattctatagacatggatatgttgcaactatttgtgtttagtagttttagcataactaaccacccctcacacattttgaaattacggcggtgagagttatgcataaacggatagtttggaggtttagtgctccgtggtagcttgggctattgcaatcagcatcgttctaggtgctttaggcaatttagctatcaatttggctatagcctatgcgataacaaaaaaagctaatcgcaaggattagctaaaccaacagttatctgaaactacgatcgaagtcaacggattgcggccgtgggcttcttttcatatacagattataacatgaattatccgaaacgaataaaaaagatcaggctcactgcctgaccttgctattgggttagctggattcgaaccagcgcatgatggtaccaaaaaccattgccttaccacttggctataacccaatcttcaaaccttttacttgattggttctatttgaatgacctctcgatcacccaacagatattagtataggggaatgaagaaaaaatatcaaggaaaaattcaaaaaaattttgattttttcacatttgctcgaaggatactgaatctttcttttatgaattataaaattaatttgtttttttacgattataacttttgtgacttcttaaccttattcattaattcaaagtcgttggtaaaaattccagctacaccaagtttaaagtacctttttgctatgcttactttatctactgtccaaattctttgcgtaactttgctaggtaaataccaatgcggatggatcgctgcaaaatgattcttagccgcaaactgttcaggaaacggcaccggccatttgtttaaaaagcaatattgttggtggggatcaattcgctggcaattttttaaggtttgataattgaaggaagagaaaataatgggatgcacaaaatgatattcttgtgctaacgccaaaacgatggcttcaatcccctcatcatgaatcttgttagtcttaaattccaagttaacatacaaatcctgtccctgaagaatttcaaataattcacttaacatcggtaccggttcaccgttagctaaacgaaatcgcctgatttcacttaaggtatagtccttaatataacctgtcccattagtagttctatctaacgtttcatcatgcattactaccggcactttatctttagttaagtgcacatcaaattcgacaccttcagcgccatgcgttgctgcatatttaaatccttgcaaagaattttccgcaaatttgaccggtaagccccggtgagcaaaaataattgtctgagtcattttttcacctacaaaaaaatgccgctctcgcggcatctgctctattttaatctaagacgattgcaccttgagttgccaaagtatcacgaactagattcttaacatctcttctaactaccataccatcggtgttctcaacgtattcaagatattgagctgacttaatatgtgcatcataagccttgtcatcaaagtaaacttcgacaaaataccattcgttttcgttcttcttattgactccagacatcataatttccatgcctggttcagcagccatgctagtcgtcatttctttcttaacttcatgcgcaaacttttctgcatcttctggtttaacttcaactttaactaagcgcattacaaaatgatctgcgttatcattcaaagcatcatgagcctttgtggtaataacttcgggctttaattcgattacttctttgtctgtggaaatcttgtcgatggtttctgcaaaatcatcagcatgtgctgctgcaatgtgcaaatcttctgccaagctattccggaacaattcgatttcgtaattgtcttcaccatgagcatcgtcatgtgcgcttccaattaacaaagttccttcttcagctggaattgagttgtgcatgttattttcaacttcacggatatattcaccgcgatcgttttccttgatatttaatttagtaattctaaaaattggtgtttcatccatttttcttgcctcgtactataatctttccacacctatcattataaactaatgcagaaaaataaaagcccctattcaccagttatttgatcaattttaaccgctttagctggccattcagtccgtacatattccaatgtactgccttcattgctagttaactgcacaaaagaacaattgggcagacctaaaaattcacgatggttagttttttcattaatgtattgcgacaaactatcgccatgaccaacaactaaaatattatcgccatcttgtgcatcccgcatgatcaagttaatcccgcgctccattcgctcaactacctcatgattatcttccacgcgaaatttgcccaaacgatgcagcggccaaagtagcacattgcgtgcctcaaaagcgccatagcttttctcttttaattcctttaatcgaacatactccatctcaggcccagcaataatctctaaagtatcacttgccctttcttggggtgagcaatatgctctagcaaaattaattccctgatcttgaaaataatcccgcacggcttccgcctgcttaatgcctaatggtgttagcgctgaatcacagcttccctgcatgcggtgtcctttattaaaccaagtttgaccatgtctgactaaatataaattaattgccatttcgtcttactttaaaccctctgctggccacacgtatgaatcaaaatggatctttttaccatcaactgttagcttcacgattgaagcattgccaaaaccgccaaagttcttattctcggtagcatcgcgcacaaacttagctaaaatatcaccatgtcctacaactaaagcagtttgaccatcctctaagccgcttaaaatctcgactaccgcacggtgcattctagcaacaacgtcttcgtctttttccatagttgggtctacgttaggattattataattccaaggcaataagaactcatcacgaccttcaaaaatgccataacatttttctcgcaggtcttttaaacgcgtataaggcatttgatgatcagtaataatttccaaagtatcgcaagcacgctcttgggttgatgaaaaagctttgtcaaaatgaataccctgctttttaaaataatcacgggccatttcaacctggcggatgcctctttcattcaatggtgaatcacaacgtccctgaactttatggtaatagttaaaataagtttgtccatggcggactaaatataaagtttttgtcatattttcctcgctaaatcgttttttcctttatcttatcaaaaaagcacgcgtcgtgcgtgctttcatattttttcgttaaattttgaagttcttgttgtattcactcgaatttacaacaaaacttggcacactaatgaagtgcattgagtaaatattgccagtcttggaaatgctaaagccataataattgtagtccccatcatgacgtgagccctgtgtattaaataaatcaccggcatgttcccattcgcggtaaaggctcttatcattacgctgattttccccagctcctgcaaagccaaagatcatttgcttcaagccaaagtaaatatttcgcttcatttcagccatagacataatcttcttattagtagaaaaaccagccatatcttcgacataattatcgtttaattctaagccatgtttcttgcaagcccgtacaattccggcaacatagtgatcgccatctttgatactcttgccattttgctcgtattcttgcgcaattgaattagctaaggactctactccagaactataaacccacggcttcaaacctaattgactacgagcactattaattaggcacaaagagaattctgccagttctttttgctcactagcagaaagatcggcaagattgatcattttttgatcggctttgctttcacctgagctaacacgtgaaaagtcgttttgctccattcctttcatgcaagcctgaataaaactagcacttggcttccccttatatgcttgcaataaactagctttcgtatagccactcggcatcttcattgtagctgttacataattctgcgttgcagcagtctttttaacgagtttggcatttttagctaataaccattgagagttatttccaatcttataagccaaatattttttcttgcccagctttaaatactttttagcagaataagaatactctcttttagctacagcataatacttagacttcttgcccttatttgtataaagtctaactttcttagttcctttaacctgaacttttcccttaactgctgcttgaaccgtttgtggtgtcgtttcgtgtattacactagccgtccccatcaggcaaacactagtcaacaaagtcacaattaatttttgcttcatagctgttccactttctgtatgttttgattattaatatttgttatttaaattatatcgtatttatttaattaaaaaaatcaaaaagagacacactatcattttgacagcatgcctcctttaagttagtttgattttatttagttttgaaaagaggtttatttttagtaccagccgtttgcttgccagaatgccttagcagcagtccatgagccataacgacctttgacatagttatcagctactcgctcttggttagctgctgaatagtcaccattcaagtatgaagctgaaagttggtatttaccaacgtattgaccatttgaagcaccgtatgagccaccagattctctaccggcaatccattccttagcactagcttctgaaccacttacagttgaagtagtagtttgagtgttggtgttatttgctgcagtagtagttgctgcagaattagtattttcagtttgagtttggtgttgtactggagcttgggttacagcagcttgagtgtggtagccgcgagttacatacttagcacgaacccattggttcttgcctaagtcataccacttgtgacctttggcatcgtaagcagtcttaattactttccatgaggtgttgcttgccaaagtttggccagtagcctctggattcttgtagctgttgtaaacagtgattgcgttgtctgaaacgttcttaactgttacaacagctgtatcgttttctacaatagcagcttgagcagtattagtgttgttattagctgctactaaacctgtaactgataaagcagttactgcaattgacttaactaagatagatttaattttcaaaaaaattctctccttaaaattttaaaagtcataagtaacgaattttcaccttattcgtccgtcccattcaattgacacagcatatactaccttgcttaaattgcagaactataacaggaatatcacctgcagattaagaaactattgcaaagtatgtcaaaattgtaacaattgtaatatttatgtaaatttattcagatgatacaaaaccgcatcagatcgccatttaactcgatttttaatttttatttgctatgtgcaaaagcttgttcgcatttaatatattgaaacacttttgcaaaacgaaaaaagaaagagttttgatacattccctgtcaagtagacagtagaattacataaagcttttattcctcagttgattaataatcagctgaggattttttggcttctcttattttcttttcgtgtattttttgccagtatttctcaattcgatgatttggtgcaatagggcaattcttaatattgcctttcatcgcttctttgcgcatttcaccagcagttaaaccgttaaaacgtttctgtggatcttcattaatgtagtaatctattgtcttacaaatagaatcattaagttcatcataactggccacttgaggatgaagaataactcgcatttctttgataatgccttgccagccttccattggaccattatcaatacagcagccaacacgagacattgattgcgtcatgccttggtcttttaattggttttggaaaggtgcgcgagtaaattgaaaaccacgatcactatggaaaagcggatgagcattagggtatgctttaacagcctgcttataggctgcttgaactaaagcagtatcgtttcgtttactaattgcgtagccaacaggatagcgatcatatagatcaaacacagtacatagatatgccttaggcaggttagcagcaacgacttcagtgatatctgtacaccatttttcattaggtctagatgcattaaagtctctttttaacttgttttcggccgttttctcaggcgttgtatgcttgaactttagcttctggtatctaggcttttgtgatctaatgccattgatacacatcaagcggtaaacagttttatgataaaccggcttttcatcagacatctgtcgattaactgccatggtcatcttttccgtcccaaacagactgttgttagacttggttatttcaatgatctttgcttcaatctttttgtctcgttcttcacgcttactcggcttgcgcttaggatcaaagtatttgtaataagctgagcgtgctattttagcccatttgcacattaaatcaatcttccaattgtacttttgatggcagtcatggattaactgatatgtttcttgtttccagcgtctttttattgcggcttgtctgtatcttggttgtccggcaagcacatcctttctaactgatctaatttttttaggaattcgttcttagtttgttcttctttgagctgacgctctaattccttaatttttcgattagccagttctaactcagttagctcttctggcttcttatgtctgcctcgtttatctgttaatcctgtttcaccattagctagatatttgtgtgtccagctgtaaacctgctggtaagaacaatcaaatttgacagctgtttgagtgtaattcttgtcgtgattaagacagtattgaacaatctgaattctttcttgctgggtagtttttcttcttgctttagtcatatagacctccggatggggatcatagtcccgattttctatatgactattatacttggaaacccattctgatactgttccattgcttctaatgccatatttattagctaaagaaggtaacgacattttgccagctaaatattcttgaacaaccttttctttaaatgccttagagtaatgattattgtattgagcattacttagaagggtatcacgattgctttgatattgatgaacccatcttcttacttgcatcgctccacttttacttggcatcttaagccgtttagctatttcaacgctgctcctattaccattcaagtattgttcaactgcccatatcttttgatcgaatgaatatttactttttctggacataaaaaatcccacctccatggataattgaatactttatgtatttcaatcgtccactttagtgggattgtatcatttcctctttcttttttaattctcacaaattttttattaatttattccattattctgccttatcctcttctataagttgacgtttattaagtgccgcaataaatggcaggtaaatcaaaatgtctaagataatattgattacttgcaaaattgagcccgcaatactgcctgttgccaaaaaaactgaaataattggcggcattgtccaaggaattacagtcccattacataatagaactaagcctaggttcattgcacaataagtggtaatcgcatttaacattggcgcaatcataaatggaataattaacaacaagttcattacaactggcagaccaaacatagttggttcattaatattgaacaagccaggtacgatggtcagtggtgctaaaactttattttgtttacttgcgcgcttgcgccatactaaatatccaatgcaaagcactaacccaatagtggcacctccatcacccatgtaaacaaagttatcgataaatggttgcgtaacgatatgaccaccatgagctaaatctaagttacctgcttgattcaatacacggttagcatcggtttgcatcaaccagattggttgcatagcagtattaactacgttaccaacatgaataccaacgaactagaacaagctcaataaaataattgaaactaatgtaccaattaaggtatcgcctaatgcacctagtggcttagccaaaatattcatgattacatcgtgaatattgccccatccaatccaagcaaaaagccagtaaacacagccagcaatagcaattacagcggcacctggaattaaagctgaaaagctcttagctacagcaggtggcacagtagctggcattttaatttggatattatgattaataaaccattggaaaatccatgcacttaggagaccaaagataatagctacaaataatcctctactacctaagtaagtgtaagggaagccttcaactggaactttatctccactcataatacttggcgtcaaaatgaagaatacagctgcagaaacaattccggcagaaacaccatctgtcttatattgattagcataactccaagcaattccaaaagctgcaattaagaccatgatcccaaaggagccattagtaatcttggctaaaatctgtgccaggcttataccatgaacagcagtttttgatagccaatcagaccaaccggcaactggaaatgaattaatgatcatgaataatgatcctacaataattaacggtatagccatggcgataccgtcacgaacagcaattaaaggtttaaaactgcctattttagcggctacaggcataatgtgtttgttaacaaacgcattcaaacctccgctcgatttactattagccataataattccctcttcaatctaaaaatgatctcgtgtttctttggtatatacctttcgcaatataacaatatcctgaaagcgattttattaccactattttaaaagataattttatcccggatttaaaattgaagtgcaacactaagtgttaaacaaaaaggccatgaagacctaaacttgaagtgacgaaaaatcaagaaaggaagatctttatgaccaattcaaattctagcatttctaagcactatcatcaattaaccagcgtacaacgtggacaaattcaagcaatgctggattccggcataacttcccgtactgttatcgctcaagaagttggctgccataagtcgacaatcagtcgcgaaatcaaacgcggaagcgtcctgcaaagagacagcagctatttattgtatgagcactattacgctgatactgcacagatttattatgagaagcgtcgcaaaaactgctatcagcgcaatccattgaagcattatgctgtctttttgagaatgctctccagacgctttaaagctaaatttgatgccaccagcatcgatgagttcgttggtgaattcaaaaggactatgccaggctacccttgtcccagcacaccaaccgtctatcgctatattgatcagggcttgctggacataagcaatattgatctgcctatgaagctcaaaagacgcaggaacaagcgtcatcacagccatggcggtcacgctttgcacaagaagcatcttggcaattccattgaacagcgtcctaaggaggttgaagacagaaaagctccgctgcactgggaaggagatctggttaaaggcgtcagacgcaagaatcagcctgctttaatgactttgactgaaagaaccacacgctttgaagtagttatcaagattcctgactatcgggcaagcacatgccaaaggctgcttcaaaaggagattgacagacatcctgcctggtttaaatcaatcacgtttgacaatggctctgagtttgcggatatgaccaagatcaagggctgccagatttactttgctcacccatattctccatgggaaaggggcaccaatgagaactgcaatggtcttttgcgtcaattcttccctaagggcaagagcatgaaagacaagtcaaaagcttatgttcaacaggcaactgatgccattaaccacaaatatcgccgaatcctccaatatcacacagcagaggaactcttcaagcaatatatctcttcataacctaactgttgcacttaatttgacaattcaggaagataattttttgcttatatttttaaccaaagtttgattaacaaaatattgcagttatggctgtaagtgctatagtttacatgtaatcataaaaaaagcgaggaaataaaattatggctaaatacgaagtaaagttaagcgaagaagatttacaaatgatcaaagattgtcattcaaagaacccttcaatcatgaaggctatgaacgaagccaagaaagtcgaagattaagcaaattttgatctctaaatcgaaaaaaggcgtccgcaagggatgccttttttattggttttcaaatcttgtaccgtggggatgcttccagttataaacacggactattttacccatgccatctagcactacaacatttccatcattatgtggataaatcaatggatcagaatgtgaaccaccgtaagtaaaaattcttgctggctcacctgggtattgcactgttctaactatacaatcatcaattgatagccgcctcatttgtcgaccatcatcatattttccttctaaagcagctgttggcgtatgaccagtcacaattgttttgcccgttttgttatgagccatcattttcaataaggaatcggaataccaatacttatctcgtgcccaaatacggtaaaaatcatagtcaaatttcaagccatactctatctcagagtaagtttccggatcattatactgttcatctggccgcacacccgcatgaacaaaaatcaagtgtggcgtttcatacataataggacagccttttagaaagcgataatactcactatcacgcaactcatcaggcaaaactgtactgccaaacagactaactaggctcttgccaccaccgttataaacccaaatgccatcttgatgttcctgcttctccgcaaaattgagtaacatttgctcatgattacccagtagtacgattgctccttcgcttttttgctcaattaaataatccaatacttccttcacatgctcgcggccatcaacatagtcaccgcccgcaactaattgtgcttctggaaaatctgctgttgcctgcttgattaagtctaaggtttctaagttgccatgaatatcagaaatgaagatatagttctccttcactcgatcatccaacagcgttcgattgataatttttttcatttcatactaccccatgtgctaaattaaactaacatttttttcttaattatagcagatgtacactggttctttttctatgcaatcctaaaattaacctccggcaaaaaaaaggctacaatagatatgaaaagaagtgattgcaatgtttaatgaagaaaatgcaattgatgccaaggacttacacgttgattctttcaaatatcaatcaactgaagacatgccatctgatgcttattctagctgggaagaaaaacacccaaacgccagggtattcaagcttgaatttcgcaacatcggcgaaagcaatgaatggcaggaaatgatcattatctacactgaataaataaaaagtggaagaactccaagcctagtgtgtttcttccacctttttacttattttgattttctttttccttcaatttgtgcagaatccgttcattttctttagtacgtttttcaactgctgcatcgatgatcgaatcaaaccaatgattatcagaatcatcgcttgtttgatccttcttttgaggaccttcattttttacacgtttgtcagtttcttcattaataatggaatccagccaatcaaaattatctggatcatggctcttatcagtcatttatttttcctccatttttgatttaaattaatttatttactattctttttgactataattgagttaacaagatgaaacaagaaagaagtgttcgaaatgaaaattacattcactgacaaggcgcttgactacttaaaaagacgcgaaatcttgaataaaattctaattttaatcgccgacgatggtggtggtaaatattctatcaaaggcggcggttgtgcaattggcagtcacttttccattatttatgtagacaaagttgatcctgattatccaatcaagcttgaaaacgaccaaggaatcaatatttacacttctaaatacgacaccacaatgatgggaccaaatttagtggttgactacgccaatgcatccctcaacttaaagagtgacgaaggattgcttgatggcggcgttgatatcggcaatggcgccgagttaattaaagctcaaaagaatgtaaaaatgaccggcgttgaatggcgttgctagattaagatgatcagaaaagacagtagtttgaaatcaactactgtcttttttctatagaaattgaccactattaggatcgaatccagtacgatctgccgcggtaatctttctaattaccttgcatggattccccgctgcaattacattatctgggatgtcattcacaactacactgcctgcaccaataattgaattacgtccaataattgtatctggagttacgctaacccctgcacctagccagacattgtcaccaatgccgatcgaatgtgcaacacaaccaccggcttttcgctcggctggatcaaataaatggttgctggtatacaagccaaccttaggaccaaacaaaacattgtttccaatataaacaggcgcgccatctaaaatcgtgcaatcatagttggcataaaagttatccccaacatgaatattttgtccaaattcacaacgaaaattagggttcacgaagggatgctcacctgttgaaccaaagagttctttgattaatatttcttttttagcgtgatcattctcattattaatattattggtcttcaaggtagcaaggtctctcaaggtgccaaggcgaggatccgcatcattataaggacgaccagtagccatgtaattaaattttgttctaagcgacatgattctttcctttcattagttcttctatttttattatagaaaagaaaaagcgctttcgcatgtttgacgcataatatttagcacactagccctaatcttattgcttattctataatggtaaaaaagaaaggattaaagccatgaaaaacttcaacaaatttaccgctaaatctgcttgccttttacagaatctactagtagtctcaattggtttactcgggattattctgatcatactcttattccgcgatctaattccactttgccaatcattattttcaactaagatcgaagaaagcaactccgagattatgtcagaaattatcgttttcttactcttctttgaatttactgcaatgattatttcagccttgcgtcatcacggtcacactagcatcaattttctattgggcttaggtgttactgcgctaattcgcagtctgattacttctcatagtaacatttggagtacgcttgccacttctgcttcaattttagtactagtaatcgcaatggttattttcaataaaaatctgcgtaatatgtaaaaaaactgtatcactctaggctaatgtcattggagtgatacagttttttgttttactaattaactttgcgccatgaactcattaagttgtttcttagaaaaaacattgccatatttgcatactacgtttcctttcattattgaacgtaattcacacaaccaaaaaagcatcatttattaacaatattgaaaataaataatgctttttagtaatactctgatgctgaatgccagagtcgaactggcgaccttctctttacgagggagatgctctaccaactgagctaattcagcaaactcacaacacatgaattataccaaatgtcgctaattggcgcaacgacctttttctaagctagcattcaaaaaagaacattatttccaatctaagcacaatccttgcttgtgcaattcttctggcaattgatcacgatcagtttcatgcagatcaagttttttacctgtaatctgcttagtgaatgaatcaatgcgacggttagaatcacgtaagtcataatatgtcgtaactatatcatcatagtctttaaggtctttcacatcaaagtctttcttataactaccttcaaaacaagtgaacttaagtggtaatcgtggttttaattgtggcttttgatctggcataccgacttgcatccccaacactggaaaagtcaactcaggcaaatcaagcgtcttaagcaaatccaacggatgatcgttaaccgtaccaagtggcacatagcctaagcccatactttctaccgcattagcgacattttgaaaagcaagcagcgtatcttctattgcttggaaaaagatatcagttgtgtgaacacggccgtcgtctttgtcaagttgctttctaatttgttggttacggtacaagtcaacgataaaaataaacaaatcgccttctgcaccaacatatttttggttacataacttttgaattttcttcttttcttcaggatcggtaacgtgcagtaagctagcattttgcataaacatgctggttggagtttgaccaaagacagaatacaaagtttccagttgttctttagtcaaagtttgatccttaaattttctaatagaacggtgatttaattgcgtgtcgattgtttcgttatgtatcattttcatccttcttactaataatcagtaagttcattataacaaataatatggctacttttcttcaaattcaattccgtaatctgcttgctctccgtgctcagctaaatcaagccccattaattcatcttcttttgatactctaattggaataatccttttaagtaataaaacgattatcgtcgtcatgatccctacaaatatgatagtaaataaagttcctaaaatctgagctgtaatcaaatgcaacccgccaccataaagcaagccattttcaatttgcgggttaacaatcttagtcgcaaataatcctgtcaaaatcgaacctacaattcctgaaacgccgtgacagccaaatacatcaagtggatcatctagcttcaattttggcttaatcacatgaatgaagccgtaactggctagtgtacaaataaaaccaatggcaaaggctcctgccacagtaacatagccagctgctggcgtaataccgactaatccacacaaggcacccgtacagaggccaatcatagtagtcttttctttaataaacatatccaaaaacatccaaaccacaaatgacgtaccagttgcaacagttgtaattaaaaacgcttgtgtagctacatcgcttacagttaaggcagaaccaacgttgaagccataccaaccgatccataatatactggttcccattaaaacccatggtaagttataatgcttaacctcaccatttggatcaaaatcaattcttggaccaacaaaaattgataaaaacaaggcggtaataccggcggtaatatgaactacagtcccacctgcaaaatcaagcatccccgttttggctagaattccatctggtgtccaaaccatatgaaccattgggtaataaatcaagatcgaccaaattgcgacaaatgcaagtaaaaatttaaatttcattcttccgaccaccgcaccaacaaacaacgccggcgtaataatcgagaacatcatctgaaacattaaataggtcaaaattgtgatgcctgaatccttggaataaagcgtctttaaatcaaagccgtttaaaaagacacttttactcaaaccaaatattccaccaacatccttacccaaagccaagttataaccaaaagcaataaacaaaacgattgcgacacctgtaatcatgaatactgaaatcatcgtattcacagcattcttctttgaaaccatgccaccatagaaaaaagcaagtccaggtgtcataaagaaaactaaaacactagcgacaaaaacaaatagagtgttcgtttgattaatcatctttttttctcctcaaagtaaaatagttagtcctaatattttaaattggtatatacactatttcattgatgttgcagcatatatgcttaattaaaaaaatattggtttgataaaatttaattctcattatacactcatttttcttcttgtcattaattttctataaaaaataaaggtgcatagacgtatggcttctatgcacctttgcatatatttgcttttaattatttgttttcgttttcaagattgttgattgcagtttcaaccaatgcatatgcttgttgagcttggttcttagcttgaacatattcgttcaagttgtcatcaccattagtaagcacacgtgcaaatgaaatttgttcagccatcaagaagttgaacaatgaatcccacttcttgtcttcaaacttgatttccttagcagaaattctaggcatcatttcacgtgtggtattaaatgccttttccaaaatttgttcatctgcatcggttaattcacgcacattgtatgcttggtggatttggtgaacctttaaaagttcttttaataaagttcttgcttgtgcatcttttgaaactgattggttaatttttaaagccatttttacctactcttttcttttttattaacaattataccaaattgtcttcgaccatttgcttaacgcagcgtttcatttctttaatatcaagaatactgtaggcaaattcttttctaagtagttcctttggcaaatattgatcgtacttgtcgattcctggcacttcgtttggataaaccagatcaagcggatcaaagtctttatcagcttcttcgcctaaaatgcgccagaagtcatgctcatcagcatccatggcaaaatacatgaagtatggtctagatgaattaaagccacggatatttaactttttaccgcacttaattcgaattaatcgctctagtgccaaaaatgcataagtcccagtccatggaaaaagacaccacatattaccgcccagcttgatcaaattattctttggcagaccagctaaagcggcggtgtctctagcttgcgtcaagcgagctttaccattttgcatcaaatatggatacatcatcttttctgcaagtacctttttcattctctgtaaaattttaggttgaatatctccaggtacatctccaaagtaggcaggaattctaccctttacttcatggcaatatacttgatgacgcttgatatccacgtcttcgacaacccatacacgtccagcaatcgcaatcttgtctcctacaggaggtggcttaacgatcgtacctaattcttcgctgccagcgtgaacactgaattcctcgttttcttggaaaactgcgtaaaatttaaagttattcacaactcgttcaccagcaagaccaacgatcagaccaccatcttcagtccactcaatgtgacctgttttaagcaagtgtttgagcaaaacgcgataatcgtcttggctcacgttgtggaaatatgacaaagttaacacccgtgaagcaagttcagctggcgtcatttcaccgcttgaagccagcgtactcatcgtctgatgatagagcaaactatatggcaaacggttaggttcaggtggctccacccatttttcttccgcatacagttgtaccaaggcaatcccttgaagtagcggccacggaatcagttctggcaacatcgctcttgattcagggtgttcttcgcgcatgacaaagtgcatctctggtggattaccgcggcgccctgtccggcccattctttgtaaaaagccagacacagtaaatggcgcgtcaatctgaaaagcagattctagtttgccaatatcaattccaagttccagcgtagctgttgcacaagtcgtcatgtagacatcgtcatctttcattgcggcttctgcagtttcacgcaaggctggagacaaattaccatggtgaataatgaagcggtctggctcatgattataggcacaatatgctctgagctcctgacaaacagcttcacattcttcacgactattggtaaaaacaagacactttttaccacgagtatgctcaaaaatatagccaattcctgggtcagctaattctggtgccttatcagttttcggttcgatttggctcggatcaaagtccctggaacttgcttgtggatttgttttataaaaatgttccatagataaatgccaaatctgtggttcattttgtacccttggtgtaacagtttttctgtttgaaccagcacccaaaaacttgctggcatcttctaaattaccaatagtagccgaaaggcctattctccgtggatttacattagctagttttgataaacgctcaattaaacaaaatgtttgtccaccacgatcacttctaagaaatgaatgaagttcatcaaccacaatatattttagaccaccaaaaagatgcggaatatccatgtgcttattgatcataaagctttcaagcgattccggcgtaatctgcaaaatacctgaaggatgcttgagtaacttgcgcttttgtgtttgagctacatccccatgccagcgccaaactggaatatccacatctgtgcataagtctatcagacgatcgtattggtcgttgatcaaagccttaagtggcgcaatatacagaacttttactgaatcttctggctcattataaatttccgacaagatcgggaaaaaggctgcttcagttttgcctgacgcagtcgaagccgacaatagcacattatgatcggtgttaaaaatttcttcggccgccgcaacctgaattggtcttaaacttttccagccatgttcatagatataatcttgaataaatggcgcataatgtgaaaaaacgtccatagtccatttccttaaatcttaaattcggtataatccttttccacattatccgaaacagcctctgacttggtatagctgaattgatccgagttaagcagatcagtgatctttctatcaggattctgccaaacaatgtcgagcagctcaataaagtcacgaataatttcacgtggcgtgatattggtatccgctccaacacgggcatattcaatcttaataaattgagccaaatcatcatcagtaatcgtgcgctcataaccgtacaaattggcatgcatgtcagctagtttttcagtcaaaaccaacatttcttcagcggttaatggttcaagcttaattactggcgcatacatatcacgtgctccttcttgagcgaatttgcctgaagcaagtcggctgcgtaaagcttcgtatgaataaactccgcgacgacggtctttaactgcttgtggcgtaccacacataataatgcctaagtaccttgctttgccctgcaaggtatcgttgtacatggtcaaaatcttttcatagttgtactggcggctaattgtattcggaattttataaatattaaccaattcatcaatcataatcattaaaccagcatagcccgcttgtctaaagaaagtcgcaaataactttaaatattcataccagtcactatcaccaataatgatatcaacgcctaattcctttttagcctcagtcttatggctatattctcctctgaaccacttgactactttagccttagtctcatcatcaccactcatataagcgtgatagtacatgttcagcaatttagcaaaatcaaaaccatgaactaattcgtttaatgaagaaatgacgccatagattttttggtcaactgcttgctcaaatttaggatcatcattatttaagcctgtttcttgcgaaacttgcatctgcactgaattaatccagcgatctagaatcaaagtcaaggcaccaccttcaggcctagtcttagttgataagttctgaattaattcacggtatgttgctaaaccctgtccttttgatccttgcagccgacgttcaggtgataaatcaccatctacaacaacaaaatttttatccatcacatagttacggatcgtttgaagtaaaaaactttttcctgagccataacgacccacgataaaacgaaagcttgctccgccttcttgaataacatccacatcgtgtaatagggcctcaatctcggcctttctccccacggtaatataaggtaaccctattcttggcactaccccaccctttaatgaattaaggacagtttgcgcaattctttttggtactcttcttttttgtggcatgatttcatcccttcaaaaacatatcttttaagtcatctacataatcggtaattacttgtggttggtcctgttcgttattttctaaaaccacatcaccgaattcatcaaataatttttcattaatattatccatcaaaattgatgccattaaatggtgctgcttcaaataggtctgccaaggctgctgcatcagcaatgcagttaagaaaaacatttcattttcatctaagccataatcattatcaactttgacagtttcatctgcttgtttttctacttcttcttgtgcttctgcctgctctagctgcttttcctcatccgttaacaaactatcacgcgtcttcgaagcattggcccgaatttgatccaaatcggaaaaatcaatcttaatctgatcaatctgcgcctttttttcttgaatgcgatattcagcaatccccgcgttaattgccttaagtacagcttgatcaataaatcgcggcttaatcgaccgacctagtttaaattctgttcgcgccactctatctaattcatggagaaaattatttaaattaacccgctgacggctgatttgttgatcacaatgaatttgccattttccttggtaaaaatgatactttcttactgcatcaatctgatggtcagctacttgttgttttcgcagataaaaaacactgcctacaaagattggcttttcaattatatcaggcttgcccacaaacgcactgtaatacgcaatgccgtattttttagcatccagcagctccagccacacgtaacgcaacagttgaacaaataacttttcattcttattaataactttagatgaattccaataagtcgttttctttgcaaagactgctgctaactcctgcgcagtaaatttttctggatggtgtaaaacctcataatcatgatcacgcttaatctcagatgcaaagcgctgcttaataatcttttcgtctaaatcataataaagaacataatctttgagccagtcttgtaaatatacatcaatactaatgtcaaattgtcgcacatatttttcttcaaattctaacagcttttcatatccatcttgtgcgtcatcaacaccaatattgttcagtaattcataaatataaacaaaggcataggatgtactcgttttttcaaaaacatgctggcgaatcttgctgcgccaagtaaagtaacttctaagctgcccagtattcatatcatgataagttggataaaaacgcttaaaggcaaaaaattcaggataatcatcatcatagtcggccatcatcctagcctgttgataaaaattcttagctcggccacgactgggcaaaatactgtagtcataaacttctagcatctttctaattctatctggaaccagactattgttatgcttcttgcgaagattttcacttggtttaattgcttgggcttgatagcggtcatctactttatctggtgcaatataaaaatattgattctgggcgatatttacttcatcaccattcatcgccagtttaaaagcaaaatcaagtgcttttttgagtgaatcttcactaactttttctaatattgtcccaacccaatctgccgccttgatcttcattggatcagtgaagccaggcaaatctcttattagtgcagccattgcaccacatttcaggtccaatatactctgaccttgcccacgtgataatatcgcaaaataaccactatcaactggtgacattaaaacgtaaacgctagtggaacctggtacagcaggcttaaatttcaaaccatatttggcatagacatatttgaagagttgatttgaatccattttgtctccttttttcgcacgtacgttcattatatcatcgatttattttttaccaaagtcacgcatgtcagctcctcatgtatatttttaagtttcataaagtttatatttttatatttgtgtggttattaacaaacaattatgttactatagtttatgtaagttattgaaagcgtttttataaaagcttcctagagaggacaaaaacttaatatgagtacaaaagaatgttattctcaagatgaattaagaaaagataatccaatgtttagccgcactcgtgccactattgaaagtgcattttacggcaacaatgtccacgaagtaaccagtgttgcagaagcttataacttagctaagaagcaatcaggcgttattgttactgacttgccaatcttacacactaaggaattaggtttgccacatggcgcaacccaattggtttacaaccacggcaagattttaggtagaactgctagcgcccgtcactttgttgacaatcctaatgaagatgctgaagcattggacggcaacctacgtgaagatatttacaagggtcatgaacaaaagtacttaaaggctactgttttagtaggtcttgacccatcattcactgttaaggctcacattatgatgccagaagatcaagccttcaaccttctttcatacatcctcaacttccacttcttcgacgatgaagctgaaaaattatacgaaaagtcaaagttctacgatgaaccagacatttacttctacttcgatccaaatgttcaagacgaagattaccctaagggcttaggcgtatttgacgctccacataactgtgctgctgtcttcaaccttcgctacttcggtgaacttaagaagggtactttaaccttagcttgggctattgctcaccgtcacggctacactgcatgtcacggtggtgaaaagtcattccactttgacgataaggacgacaagacctttgccttctacggcttatcaggttcaggtaaatcaactttgactcatgaaatgtacgatggcaagtatgacattactgttttgcacgatgatgctttcattatttcacgtgaagatggttcttcagtagccttagagccttcatactttgacaagactcacgactacccagcaggccaccacgagactaagtactacaccactattatgaactgtgatgtaaccttagacaaagacggcaagaaagttatcgtaaccgaagacttacgtaacaacaacggtcgtgttatcaagacccgctacactagtcctcaccgtgtagactttgaaaagtcaccaattactgcattgttctggattatgaaggacggttcattacctccaatcatcaagatcgatgacccagtattggcaactactatgggttgtactttagcaaccaagcgtacttcggctgaaaacttacctaagggctttgacatgaatactttggttattgaaccattcgcagacccattcagagcttacccagtttcaggtgactacagagacttcaaggaattgttcactaagcgtggtgctagttgctacagcttgaacaccgacgcatttatgggtaaagacattcctaaggaagttactaagaagttaattgaagacttagctaacggcaatatcaaagacagtgacttcaagccattcggtaacttcaagggtgtatcatacttacctattgatggttatgaagttcaccttgaggacccagaataccaaaagaccttagctaagagaatgcaagatcgtttgaactggctcaacaagtacgatgaagaacacccagaaactccaattcaagatgaagctaagaagaccttggaagctatcatcaaggaattgatctaatattaaggaaataaattagtgtctcattcaattaaaatttaatttcttaatgacgaaaagacgagagttgaaattcagctcccgtcttttttattgctcaatgtaattttgcttctgtagtttggcatctatcagtttataaacttgcactttattctcttgtgcaagttgtggattatagttatgtgctatttcaatgacaatagccggcaattggtagattatcttatgaatggcatcactatttttagggtctaaacttgaacaaatctcatcaagcaaatatatcttcttagaacgaattagacctctaactaaagcaagtcgttgtgcctgaccacctgataaattgttcgcgtcatctgaaattaatttatctaaaaaatcattgccaaactcatgaatcagtcccatcttttttgcttcatgaagcattagatcatcaggtatgttttgcagaagtgatagattctccctcactgtaccttggaataaccagattctttgcgagatcttgatgaaatcggcaggattaatttgatgaccagcaaaggtgatttcaccgttatacttcagattattagcaatacaattaattaatgtacttttcccaatgcctgaagccccagtaacaatgatcttgtcatgatcacgcaaagttaaatttataccatctaaaattttcttatcaccatatgaaaaagacaaatcttttattttcaaaatagcttgagagtcatgattatcttgtttaacactttcactttcttcaaaattatagctttttatttttctaattgcatcggtgctatgaatttgagtctgatacaaagcaattgttcttagatatcccacaaccctatcagctgacaaacttaaagttataatggccgctaccgttacgttaaaccagcctctctgcataaaaagcaagccaataaaaattggtagcaatagtgtaactaaagagattaaccatgcaatgaattgtacctggaattgacaattattcatcttacgatatttgtcttcctcattaaccaagattcgatcaaatcgtttaaagaaaagatgtctgacaccaaaattcagtatttctaagcgtccttcaaatatatccttcattgcctgaatcaactgtgagttagatttattccatttttcggttttctcattcatcctcttcttgccaatatagcttggaatcagggttagcgctgaaagaagcaaataaataattcccaaaatcagattagtttctacaacaactattgccgatgcaaccacattaaatacaaactgaactatgtcagttatcccaaagaaatatttttgttcaatttctttagcagtaccactaatcgaattgattacatctgctcctcttgcttgcttcatgtctgaattagcaaatttagaataaaaatattcttgctttaaagcaatatttaatagcatcacaattctattttgaaccaaataaaacaagagcatggctatgtagactatcagatatgcgccaaaggctaagccaataaatttataaacgtggtcaatgttactaaaattgatattagttaattgtccaaacagtacagcatttaataccccttcaaatgctgaaatggccgataaaaccagaaaaactatttgtaaatatattggaacatgttttactacccatttaaaatttatttgttgtgtgttcattgtttaatacccacatatttctcataatcaacaagccaatcttcatcatttttataagaatgattcatacactttttaaacccaattgctttaaatcatcttcatctttagtttctaacaattgtcgctcttctagagacaagtgatacttattcactaaggcatcaatattctccaaagaaatatttttaccatcagaaagatcctttcttcataccttcagacattactatacctcctattttctctcgttaagtaatgcataattttcaacttgcaatttactgtgtatgggattgatatcaatgcttcccataattccccaaatgcttataataataacagtaagtattctcttattttttaatttcaaagccaggaattcattatgtacggtcaaaaatttaaagcacttcgtcttcaacaacatatttcactagagcaagctgctaacagagttatctctccatcgactttatccagatgggagaataataagattgatattcgcttcaatttagttattaagcttttagacaatattcatataaacctaaaagagtttactaattactgcaaaattaatcatagtaatccatttgttgcgaaagtggctatgtactatgaagccaacgatgatcgtcatattttgcaattaatacaaagcaagaaaaaagaataccaaaattcacataatcaatttgatttacttctactagctatcgcatgtaattgttattacgatctaactgataacaatgttttcccagtgagctatcaaaagaaattattctacattttatctaacattgaatattggacagagatgtacatcaatgtttttggtaacactgtttttctctatgacagcaaggaactatatagtatttcaatcagaattcttaaaaatttaaattctaatacatttaatgattttcaagaatattattatgctttatcctctgtcatcaacgccctaaccgctctaattatcaaaaatcccaaattagcatcacagcttttaactaaaatagagaaagtttcaattcctaaaccaatctcttacttaaaaattagaactaatgtcctcaagtatcttttagattaccgtttaggcaaaacagatgaaaagcttatctcaattaagctagaaaatttaaagtggttaggattaacagatattgcaaaagacttaactttcttctttaaccgtataaaaaatgatcgttcacctctttcctaattcatttgcctattatattaccctcatttttatctaattgatttttctttgcaaatatgcaaaattatttttagcaagaataaaaaagcctattaaatctaggtgtttacaaaccctgatttaataggtcttttatgcgtcttttttattgctcaatgtaattttgcgccttagttaaaatatccatcttctcatgttcagttaaatacttttgtgcttctgccaaattgacccatttactagctaaaatttcttctttttgaatgttaacctcttgtcctgcaacatagctagcaacaaaataaactactgtcttagctttatcaacagtcaactgatattctgttttttctctaaaagtaaagtcaaaattcggctttaaaccaacttcttcaaaaacttctcttctagcagcttcctcagctgtctcattattttctaaatggccttttggaaagccccaattatgatttacgacgctctgcacgatcaaatatttcagctcgccgcttctacgttctctgtaaataactgcacctgcagaatgttccatcttcatttttgtcacccaacctttatattgcataattattaaatatttattaacgtatgtcaagcaattgtaatcaaaaaaatgaccagatctttgacgatctagtcactttattcgcagacgaaattattaagttctattggtagaatattttaagttacttcttcaagttcttttcgcagtattccttgaccttgtcatcatcggccttaagaatccattcaactgcagcctcagtcttcatggtgtctcgaccatttacttccatttcgtggtcccaaatagcgtcacgaataggcatttcattacccttagcccagtcaaaaacttgatccatatttctatcaattaatgcagtttcttcaatttcttttgcatctgccataattaaaagcttcctttctgataacgactttattgtagttctattagctacaactgttaacaaaaagggacttttttatttaaattctaatttttgccattaactgcttcatcagccttattcactacactaaccgcattaagtgaacgaggataaccaatgaatggtacgttttgttcaatgaccttcatcaagaattccttgtcattgcctaatttgatatttgcttgagcatgggccatcaattgaggttcacagccaccttgagctgcaatataacagaaggtaatcatttcacggtcattgtcatccaagccttttctagtgtagtaagcgccaaagcaattatcaactaaccacttattgattgttcccttcttggcaaaacccttcatttgtggaccaaacaagcgcatttgagtttcctcacccttttcaaggcgattgtctagtgtagtagttgcttgacccgcaagaggtaattcaacgccgcgcttagttaaaacatcattagtaatcttgaaaaatggggaaactctacccaaacctaaataatcaaccgcttgatataaacttccttagcttcaactgggttaacaccattgtctagtacgactggaagcattatttcatattcttccttgccttgcatccccaacaaataagctaaagttgacaacatcttagtccggtcgggcaaatcaacgtctttttgcacttcgtcaaaagcaaaatgattaattctttccaaagcttctggatcagtagccttcaataagttggcatgtactctttatgcatcttctttaattgacataataaattcctttctaaacgcttatctctactatttatttaagtacgattgagtctaaaagaaaaatatctattttttattctgcaatataacttattcttatcaaaaaaatatcctaaaggctttttgccttcaggatatttctattaggttatttaattagtttttcttgtctgcttcagcatcatggtatgacttaacgatttcatcaactaattctggatcatctttcaaatcagtagtttctacaatgacatccttcaagtcttcatctttaagcatttgcatcaacttaacgctttccttgtcgttaggttcatcaaagtgataaattctaccaacagtttccatcaatgcactgtagtccaaacctctgtccttcaattcacggattggacggataaatctttcattgtagcctaacttacggattggagttctaccaacacgagcaatatcatctgaaatatatgggttttggaatctgctcaaaatcttgttgtggtattcttccaaactttcttcggtgaattccttgttccacttgtggtaaagaagtgaacgggtttcactcaagacacgcttaacttgctttaaaacaaatggatccttaatagcatccccaatagtgtcatagccaaggctcttgccagtataagcaacagttgcgtgtcccgtgttaactgagaataactttctttcgatgtaaggttcaaggtctggtgcatagtcaacgccctttaacttgatatccttgttcttcatttggctttcgtcaataacccattccttgaagtcctcaactgagacaaacaatggatcgtcattatgttggataggaacaattctgtctacagctgcgttagggaagccaatgtacttgtctagttcaggcttaacgtcatcgtccaagtgcttataaacttcttcttttaagtgttctgaaccgccaatcatgttttcacaagcaatcacatcaagtggagtagtgttgcctgattgaattctagcagttaatcctttggcaattaatggagcaatgattgccaaaatctttggaccaatggcggtagttatcatatcggttgatttaattgcttcaactaccttgtctggatccttagcattgttaattccatcaacatttgaaacatgaattctcttcttaccaggtgcggctaattcaatgtcatattcaccacgcttgtttaattcatcaataatagtttcattaacatcaacgaagtcaatgccaaaaccattatctgctaaagtttcaccaataaatccacgaccaatattacctgcgccaaaatgtactgctctcatgtttaatctcctacgttctttaataaatcaataatttcttctggtgtttgtgcgtctgcaagctttgcaacgttggaaacatcactacagaaaatagcaatctgtgacaaaatatttaagtgttcattgttcaaaccagcaatcccaaagacaacggttaccaattgctcggtatcatccttagggtcactaaaatcaacgcccattggaatttggactaccgaaattccagtttttttaatgtgcttcttaccttcgtcagttccgtgagggatggcgatgaaattacccatataagtcgacacatcttcattacgggcaagcattgaatcaatatactctggttcgacacagccgccatcaactaataattgaccggccattctaattgcttgatcccgcgttggtacgtcttgattaagtttgatcatttttggatctaattgtaatgccatttagctcatccctttctaattcaacttttgaatagcttcgccaagctttttatctttaagtaaatcatcaacaactagggtttgaatatcactgtatctgacagccaagttcttattagcagctggagtaacaattactaagtgacttggatcatcagtcaattcgttgattcttactgccttaacaggagtagtcttaccagccttcttaattgcgtcattgaataaactagttgccatagtagcggtacctaagtgttgatcgtgacggatgaagtccacttctttaactttactgaagtcgattccttcaagtgaaccaaccttcttaactggtttttcagcctttggcttatcttctacttgagttaaagctttgaagctagctacgattgtgtcatatttcggactactcaagaagttgccaaccgccacgtgcattgcatgtggagtcttttgtaaagcgcggtcagctaattcttcttgcgtgatgatcaacaaaccatcttcatctttcaagtttctaacagcggtattggttactgaaaccttaatgccagccttcttgaatttatcacgcaaaagtgaagcacccatagcagatgaacccatacctgcgtcacaagcaaagataattttcttaacattggcatatgacttaactgattcatgtgcatcttcagcttccggcattgattgacctttagattgggccttcatggcttgcatttgggcttgttttgcttctaactcatcaccagtactcttgtcgtttttaagaataattgcggcaataatgaatgaaacaactgcggcgccaagaacaccaacaatattaccgaaataagcatcctttgcggaaacaagcaagatagctaaaattgaaccaggtgaagcagctgcttttaatccaccaccaagagtagtgaataagaaagtaccagtaacaccaccaccaatagcggctaaaatcaatgatggtttcattaatacatatgggaagtaaatttcatgaaccccaccaaagaattcaatgatggcagcaccaggagctgagctctttgacttacccttgccaaataaagtaaaggcaagcaagattccaagtcctggacctgggtttgattccattaagaacaaaactgacttaccaacttgtgcagcttgttggatacctaatggaactaagatcccgttaccaatagcgttgttcaagaacaaaactttggcaggttcaataatgatgttggctaatggtagtaagtgaactctaataattgcatttactcctgcactagcccattgactgccaacttccataatcggtccaatgataaagaaggcgaaaatcgcagcgatcatgcctagaataccaagtgaaaagttattgtagatcatttcaaaaccagatttaatcttgtcctggaatacttgatctagtttcttcaataaccatgcactaagcggacccataatcatggcacctaagaacattggttgatcagtaccaacaattacacctaatgtaccgattgcaccagcaatggcaccacgttcttcataaaccatgcgaccacctgtataaccaattaacagtggcaacaggtaatgaagcattggttgaactaagttattaatttctttgttagggaaccaaccgtgtggatacataaagaatgcagcggtaagtccccaagcgataatggcaccgatattcggcatgatcataccggataaagctgtaccaaatttttgaaccttcactttaacagaagatttactttttgcttgagccattttcttcttcctctctcatcaacttacatttttattctaagtcaatcagtaagcgcttacaatgaaatgaaaatagaactctggcacacttttgtgccagagtctgagtttacctattctattaagcttttgaactattggttacctagtaaccgatctttgaggtcttgtaaaaaaagtgccgcaattgcttctttaatttctttttgactgccatttgtaaataaatctaagttttgactagacatgataatcatgctggaaatagtactcattacccgctgttcgggtgcagtaagattgtctggtgccagcatcaaaagaactcttttgacttgaatggtatcatgatccattgattggagcgagatttcattatctaagtcaaacatggtaaatgaacagcgtgtaatttctggactacgtgtgtgtagcaatgcgatatggctgttagggatgccaactggtgccattcgtacacgtttgagaagatttttggcaacgggcatttgcttacgaattagtgttgaatccgaatgggctaaacattcctgaattactgcaattaagtcttgcgaattgtattccagttgttgaatcttgattccgttgactagctccgagcaaaataatgtactaatcgatagcttagcaagttgttcgactgaatggggatgtttttcttcaactacctgtttagctggaactggttgaggatatttttgttcataatcttttaagtaagcgcggatttttattaattcatcatcaagcagtaatggactaacaagtaaataatctcttgagaagcccttcaatctcaaggttgaaaaaataagattgtaatttgacaagtctatttgatttaaggcagaaacacggctggttttgacttctttgatttcagaaaattctctttttagtttggcacctaagattgccgacgttccaatgccattttcacaaattactagggccgataaattacgctgctgattgcgactcgtgtattcattggcaaaataaagcaagatcaactgcaactctgacgctgtcaaataattttctggaaacgctaaatgccaatatttttgaatagctagatataaatcaggaaacttttgactaaggcctgccagaatttcaataggtgtatctggtaaaagagctactttatgttgtactaaaccaataacgtgtttcgtcactttagtcataaaactatgatctttttgaaaatcccaatgcatttcttcagaaacgtgttgaacgaattcttttactttgactgagattgctaattcgcgctcattataagtcaagtaagtgttgtgataatcacatgataataacttattagctaagtatgagacatcattttggtcaacctcaacttgccgcttttgcgcaaacaaggccataaaacggtaaacataaccctgatatttaagtgaatcagcactggggtggataaaatctagcttgcatcccgccagagttctttttatcgttaccgcaaaagttaaaattaactcaatcagcttttggtcactgtctagcttaattttaccaaacacgctttttttaagacaatcagcaacctctactagcaaagccttatcaatcattgtcaaaaacatgtctttgcttgtcgtttcattatgcagatacttaaaaaagttatattcattgatctgattgagcataatatcaactaaaacctgacgccgtattttttcaggcgcctgaattaacagtcccacaccctttttgcggatcaagtcaatatgatatcgttttagcgacctttcaaccgtattcaaatcactttgaatcgttgcttcactgacattcaggtcaagcgcaaattgaataattttacatggctccgtacttaaaagcaacttagctgcaattatcttctctcttttagctaccgaaattacattttgactgtgagattgttgcacagattgcttaatttcttgtaattgctttgaatcgccagataaaaaatattttcctttttgattttcaattttaaagtcgttcttctttaaatcgccaaattcgcgataaaccgtccggcggctgatctttagactctcttcaatttgtttgatacttaccccactcggatttcccaacaaaatttgaagaatgtgcttttgccgttgtgttaaaaacatcccatcatcctcgcttacgtttaagtttattatacttgaacgcaaaaaaagaagacagatctcaaatctgccttcttgaggatatttatttacatattaattattcaacagtaacactcttagcaaggttacgtggcttgtcaacatccaaacccttatcctttgaagcgtagtaggcaagaagttgagttggaactactgtcaaaagtgctgacatgtagtaattaatttctggcaacacgatcgtgtcatcactatttgcgaattccttgcctacaatagtaattactgaagcaccacgtgaagcaacttcttgaatattaccacgagtaagatctgcagtaactggatcgttaatcaaggcaataactggagtgccatcttcgatcaaggaaatggtaccgtgcttaagttcagctgcagcaaagccttcagtttgaatgtatgaaacttccttcaacttcaaagcaccttcaagtgcaacagcgtgatcaataccacgaccaatgtagaatgcgtttcttgattttacaatatattgatcagctaattccttaagcttttctttaccgtcaacaatttgttggataccttcagcagcgatggctaaatcatgttgtaagtcccaatccttagcatcttgattaccaagtttttcaccaagtgccttagctaaaatagcttgtaaggcaacttgtgcagtgtaagccttagttgaagcaacggcaatttcaggacctgcacctaaaagcattgtgtagttagcttcacgtgataaagttgagccttcaacgttagtcatagtcaaacttggaataccacgcttgttagcttccttcaataccacgcgtgagtcagcagtttcacctgattgagtcaagaaaataaagaatgggtgcttgctcatcattgggaagtggtaaccagcttctgaagcgtaaccaacttcggtaggaataccagtgtagtgttcaaaaatagttttaccaactaaacctgcatgataactagtacctgcagcaaagatataaaggcgatcagccttagaaatagcatcaataatatcttgatctacctttggttcaccattttcgtcaaggtagttttgtgacatgtgacgcattacgcctggttgttcatcgatttcttttaacatgtagaattcgtaagtaccctttgaagctgcgttagggtcgatgttcaaaacgtgaggttcacggtctacctttttgccatcaacagtttcaatagtgtaagaatccttggtaatgtcaccaacatcaccatcttgcaagtcaacaaaagtcttagtttggtcaagaacagaaatagcatctgaagcaatgatgttaaagccatcaccgattcccagcatcattggtgacttgttcttagcaataaatacgtggtctggttctgtgttgtcaacaagcaagaaagcatatgaacccttaaccaacttcaaagcttccttaaatgctgaaaaagcgtctaagttcttatcacgtgcaattttaccgatcaattgaacaactacttcagtatcagtatctgagtggaacttaaccccttgcaagtacttttcctttaattctgtgtagttttcaatcacaccattgtgaactagatagaaacgcttggtttcatcaaaatgagggtgagcgttatctacagttggcttaccgtgggttgcccaacgagtatgaccaataccaactaaaccttgttcatctggagtcaacttttccttcaagttagaaatacgaccaacagccttagttaagtattcgttaccatttaaatcatttaagtaaatgccagctgaatcgtaaccacgatattccaagttggttaatccatttaaaataatatctcttgcaggcttacctacaactccgacaattccacacataattttctcctttggtctagttcgctttgaagtaatggactagcttatttttattgttacagtaggtataatagtctttttgcaaaaatcggtcaagtacaaatattcaaaattggtattataattttaagcataaaaaatggctaccagaatttgctccgatagccatttttacttaagtcaattttaacttttattacttgtttttgatacccttaccttcatagcagtctctcatcaattgagaaatttgactaattaatggagctgatgggttagtaacagtgttttggtcgccataagcttcaacagctaattggtccaccttcttgtcaaactcagccttatcaacgccataatccttgaaggccatcttaataccaactgattcagccaaatcaataattttctgaactaatttttcaattaattcagcatcacttgaaccagttaagccgattgctctagcaatttcagcatagtcgctttcagcacggtaaactgagtaatgtggccacatagcaagtttttctggacgcttagcattaaagcgaatgacttgtggcaaagcaattgcgtcactgacgccacttggaatatcaaaagttgaacctacggtatgagcaattgagtgttccaagccaaggaaggcatttgaataagccattccagcaatcgtagctgcatcatgcattctctttctagcatcaagatcgccatcgtaagacttcttcaagttagcgaaaattgctttaatagcttaaccacgagtgaagtcagttgccatggttgaaacataactttcaattgcgtgacctaatgcttcaaaacctgaccaagcaattaaacgtttgggcagcgtttgcacaaattgatcatcaacaattgaaacatcaggtgttaaagcatagtcacataaggtatgtttaattccagttttggcatcggaaataatagcaattggggaaacttctgaaccggtacctgaagtagttggaatacatacaagttggacaccattaatctttgggaaacggactactctttttctaatgtctaagaatttttggtaagcctcttcaaaactcatttctgggttttcgtagaataagcgcattgctttagcagcgtccattactgaaccaccaccgatagcaattacaacgtctggcttgaagatgttcattctgtgaacaccatccttgatcacatcagtattaggatcaagagttacagccttaaagacttcatattctttttgacctaaacgcttagaaatgatatcagtaacttcatcagcaaagccttggtcagctacaccttcatcagttacgatgaagaaacggttaacgtttggcatgtgacgaaggtagttagcagcgttatgttcgaagtaagtctttgatggtacctttacccattgcatgttatcacggcgtctagccactgttttgatgtttaacaagtccttagcaccaatgttgtgtgagaaggtattggcaccatatgaaccagtacccaaggtaagtgatggcaacatattgttgtaaaggtcaccgataccaccgagtgcagctggtgagttgactaagatacggcaagcatccatcttcatggcaaattcatcaataatcttcttgtcatttgagtgaagaccagcggtgtgacctcgaccaccatagttcaataaatcggtacaaatcttaaatgcatcgtcatggttcttagcacggtacaaagtgaagactggtgaaagcttttcagctgatagtgggaagtttctacctacgcctttatattcagcgataattactttagttgtctttggcacatccacaccacaaagcttggcaatttcataagctgacttaccagctactggaccagcaaccgtaccacgacgaggatcaataaagtgttcctcaaacttcttaatttctcctttgtttaagaagtagcagttccacttcttaaattcttctttaactttgtcataaatttcagtatcaacgacaactgaattttcagaagcacaaaccataccgttatcaaagttctttgataaaacaatgtcataaactgcacggtcaatattagcagtcttttaggaccattaccaggaccaacaccaatagctggcttgcctgatgaataagcagctttaaccatacctggaccaccagttgccaaaatagtttgaacacctgggttagtcatcaaatcggtcgttgcatcaaggcttggttcttcaatccattgaacggcatccgcaggagcacctgcagcaacagcagccgcacgaatgattttaccagtttctacacaacatttttgagcctgtgggtggaaaccaaagataatggtatttctcgtcttcaaagcaagcattgccttgaaaataacagttgaagttgggttagttactggagtaacacctgcaataacacctttaggttcagcaatcttagtcaaacctaattccttgtcttcttcaattacgccgacggtcttttcgtgacgcaaactgttccagatattttctgaagcatacatattcttggtagttttatcttcaactacaccacgtttagtttcttcaacagccattttagctagtgggtaagcattttgttcacctgcagtagcaactgcttcacagatcttatcaacttgttcttgtgtgaagttagccatttgatctaaagcgacatgtgatttctttactaagttatcgaccatgtcgtagatttgctttttcttttcgtcctctgtaagagtctctttttgttgtgtcttagccattgtattattacctctaagatctactaattcttgtgaactaatttacaatgtcaactatagcacaataactttatttgtaaatgcatgaatttatgaaaatagtgaattaacaaagattcacatttcctcataatttcgctctaatgcaaatgaaagctattccttaattatttgtttgtgaattaacaaacttatttttaaaaaacagatttttgatatttttttaaatctaactatagagtctggtcatactaattgataatgataaaatattaagtatatgtgaaaagattgagaacattggggggcttatatgagtgagaaaaaaacacagaccgcttctggttataaacgaaccctaagcaatgcacacattcagttaattgctttaggtggaacaattgggaccggcctttttctgggggttggagacagtattcaccgcgccggtcctagcgttatcctgatatatattattgtcggtatcttcctcttcctgctaatgcgggcactgggagaactaattatgtccgacttgaacaagcacacatatattgattttattgaacaatatttgggtaaaaatattggctttatcacaggctatttgtattggttaagttggattaccttgggtatggccgaaaacacggccctaggaatttacttcaagtattggtttccaacactgaaaccttggattccaggaattattatcattgtgatcttgctgttaatcaatttaatttcagctcgtgtctttggcaacttggaattcagttttgccattatcaaaattgtcacgattattgccttcgtcatcttgatcctttacttactagtaactggtggcaaaaccagctttggtcctgttagctttgctaaccttgacgatcatggcggcttcttcgcccgtggcagtaaaggattcttacaaggatttcaaatggtaatcttcagctttattggagttgaattaattggtttaaccgcggctgaagcacaaaagccagagacaacgttgaagcgagcaatcaatcaattaccaattcgaattattttgttctatgtcatggctattttaggaattttgttagtaattccatggtccaaagttgctactaacgctagtccatttgttgaggccttaggtgctactggtattaaaaatgctagttctattattaattttgtagttatttcagccgccgtctcatcaactaacagttttttgtatagtgctggtcgattacttttctctgttacttttgacggtaaaggaaaatggaataaaacttttggacatttatcaagaaggcagcttccacaaaatgcattgactttatccgcattattgatgggatgtgcaccactaatcaccttggttattggcgatcaggcctttaattttatctcatcaacttcaactagtatgtttttaatcatctggagtttgatgattttaactcacatggcttacaggagaaaaacagcagctaatcagctaaacgattttcaaatgccaggttacccttatatcgattatgtaatcttgtcattcttcgttttaatgattatcctgctattgattttaccaagctaccgagtaccaatggtcgctgcaattgcaatctttattgttttatacatcatttccaaaatttggagtaatgaaaaagctgtttaaagcaaaaagtcgagttttttagctcgaccttttattttgcaatttttttaattattttagcaggatttccggcaactaccgtattagctggcacatctttggttacaacggcattagccgctacaacggcgtttttacctaccgtaacgccaggcaatatcgttgctttagcgccaatccaggcgttttgtttgataacaactggctttaattccagttcttttctatgctgtggatccagcttgtgattaactgaaatcaggtaggctccaggcccaatcaacacatcgttctcaattgtaatcccgcctaagtcgaccatcatcacattggcattaataaacacgcgctcgcctaatttgatgttgtgcccataatcagaataaaatggtaaccgaatctctatactagcagctattttttgaccaattatttcactaatcaattgtctaacttcacagctacaatgccgttgtgtatttaaattctgcaataatcgctgattctgttgggctagttttcgacgtaaatcgtgatcttctgtttccattattaccactcctttttcttgctctacttcagtttaaagggtaagcttatcaatgtgcaaagcttataaggtatgaagtataataacaattgtttataggtgatttaaatggaattacgtgttttaaattattttgtcgctacagcgcaagaattaaatatgacgcgagctgcacaaaaactattagtctcacaacctgctttatcgcgtcagatagcagatttagaggatgaattaggcgttaagttattcaaccgccagccgcggcacttaaccttaactcctgcaggacagtatttatatgaacaagcaaaagaaattcttactttagcttccaaaaccaagagtaacctacaatctagtgctgtcatcagtggtgacctaactattgctgccggcgaaagttttgccatgcaacgtctaatgaatatcgtcagcaacattattcgggattatcctacagttaaaattcatattctaagtggcgattatgaatttgcagaaaggcgtttagatacaggtgcagttgattttgccgtaatcattggtaatctacctttagataattatgcttctctgcagctccctgagaaggatacatggggcgttttaatgactaaggatgatcctctagcaaaaaagagtgctattacagctgaagatttagttggacgaaacgtcttaaattcacaacaagccgaaaatcgaaagtactttgattcatggttcggtaattataaagagcaaattaatatcatcggtactgttaacttgaatttcaacggtacacttttagttaaaaataaagcagctattatgctcacactcgataagctagccaatatatcagatgaatccaatctaacttttagaccaattactccaatgttaaaacagccggtaacagtaatttggaagcgagaaaccaataaatcacctgtagctgatttattcctaaatcgtttacgagcatcaattgatgacgattaacaaaaataacctagatcgaattgatctaggttattttttactttatttctttttacgactaaaacgttgcttcaatcgttgccataagcttaatgccctgcgcatatgatcagctggtacatattttcttattgctcgcaatacctttttggaatcacgtgccgcaaaaacaaatttaccatttgacttagttctgatttcaaaacgcggaatataacgtccaccaaagcggacatctgcaaccacataagttacttcattccaaggaatctgaacataatcttcaacgtttcgttcgttataaaattcaaaagctctatcgccgatcatgattttgccgtatgatgcaattcctctaaaccaggttgcatcaacagtgagatcgacttttgtattaattgacttagccatttattaaagaatgccccatacgtggaagagaacaccgacaacgaagataccgatgataatccagattggtgaaactttcttcttcaataaccacatacagaagaaagttaagagcaaaccagctaaaccaggaattaattggttcaagttgtcttgtaaagtagtaactttagtactgcttaaagctttaccgttacccatatcccattgttgaagagcggattggatacctttagcacctgatggaagcttgtcccattcgatgtaaccacccttttgaataggagtttgagaaacaattggagtgaacttgatgtttacccaacgttcaattaaggcacccaagacgaacatacccatcattgaagcaccacgggtaaccttttgaagcataccacctgacatatcactggtgatagctgaaccagccttgtaaccaaattcttgtgtgtaccataagaatgcgattctgataatattccagataacgaagaacaagataggacccattacgttacctgcaatggccattgatgcacctaatgcaccaacaattggacgaacagtgtaccagaatacagggtcaccaacaccggccaaaggtcccatcataccaaccttaacaccttggatagcgtcatcagtaacttctgcaccgttagccttatcttcttccaaagccaaggtaacaccaagaacaggtgatgctaagtatgggtgagtgttaaaaaatactaagtgtctttgtaaggcagcagataaatctttcttgtttgggtataactttctcaatgctggaatcattgaataagcgtaaccaccgttttgcattctttcatagttccatgaaccctgaaggaattgtgagtgccacataacgttaaaacggtcgcgcttggttaatttagttttcttatcagccattatataaatcctcctctatgcgttcattttaatagtcatcaatgatatcgccgagtggatcgccagtgccggcatcgccagaattattgtttccaccgttgccacccttagcttcaagagctaagtacatcaaagccattgaaaggccaatagcaccaagggcgatcaaagttaagtctttgatagcagcaagggcaaaaccaattgcgaagaatggccatacttccttacttgccatcatgttaataaccatagcgtaacctacggctacaaccatcgcaccaccgatagtcataccttcgtttaaccattgtggcatcattgcaagccaacttctaacagtacctgaagggattgctaaaagaagtgcagctgggatagcaattctcaaaccttgtaaacatacggcaatccattgccataagttgatcatacgccagttacccttcttagcttctgcgtccatgatgtgaacgatagcagttgaaatagtacgtacgatcatagttaagaacaaaccagcaacagctaatgggatagcgataccagtagcagtaccaatacccttaataccttgaccaccttcgatcaagataatagctgaagctactgatgctaaggcagcatctggtgcaacagcggcaccaatgttagcccaacctaaagcgatcatttgtaatgaaccacctaaggcaacacctaaatccaagtgaccggttactaaaccgatcaaagtacaagcaactaatggttggtggaattgccattcatccaagataccttccataccggcaagaaaggcaacaaacacaaccaaaatcatttgaatagcgttcatttatttactcctaattatttattactttttttcgtcaagtaaagtttgagccttcttcaagatagcatccatattacctggagcatctgaaggaacttttcttacatcaaacttaacgcccatcttttcaagttcacggaatgtatcaacgtctttttgattcattgataatacgttgttggcgttaacatcgccttccttatatgacattgaaccaacgttgatattcttaagatcaataccgcctttgatagccctcaatacatcttctggattttcaaacaaaagaagtgcatgagtgtttccaaatcttggatctttagcaatttcttgcatcttcttgagtggaacagtatgagccttaacacctgctggtgcagcttcacgaatcatactcttacgtaaatcatccttagctacactatctgaaacaacaattactctatcaggcttcatagctggaatccaaccagttgccacttgaccgtgaagcaaacgtgaatcaattcttgccaaaacgtacttgatatgaccatcaccaataacagtaccttctgggatgctcttcttactgcccttagcagcagctttgtcagctactggagctgcagcagccgtcttaggcattaagtcagctggcttagtcttaattccatctctaccaggttgaacaactgcagtggcgatgtgctttgcagttgcattagcatccatcattctctcagtcaatgcttgtacaaccattggtaaattcataccagcaacaattgcccatttatcatgcttttcagcaagccaatttgcttggttaaatggagtaccaccccataagtcaaccaagaacaaaacttcatcttggttatcaaatgaagcaattgctttttccattttgccacgaatgtcatctggaccttcatcaggctttaagataacatgtgcaaaattatcttgttcaccgaaaagcatttgtgcagattgtgcaataccatcggcaaagccaccatggctggctaaaacaattcctaccatgtaatttcctcctctagatcaaaaaatgaatccgcttttattatacgataaatatagactttaaaaaagtgttttttgaaaataatttcataaagtgccaatttgtttcaagcagtccaaatgccttgtctcccaagcaaagacagaaattagtctaataaaaaaagaaagcctgttttcatgatttgagtcgtttttcacaaatttggcttcctattaaaatatatgctggttggataatttcattttcataaaataacaaaaaaggaagccttccgcttccttctcccctttactccggctgtcagactcgaactgacgacatcttgattaacagtcaagcgctctaccaactgagctaagccggaatattaaaaaagagcacggcagcttcctttcctcgcaggcagttgcccaccaactactttcggcgttaagaagcttaacttctgtgttcggcatgggaacaggtgtatccttcttgctttcgccaccgtactcttttgagcttttacactcaaaactaaacataatccttctcgcaaaaaaacttccagtttgcttcgctttggtcaagtcctcgactgattagtactggtccgctccatccttcacaggacttccactcccagcctatctacctcatcgtctctgaggtgtcttactgcttacgcaaaggaaatctcatcttgaggggggcttcgcacttagatgctttcagcgcttatcctttccgcacatagctacccagcgatgctcctggcggaacaactggtacaccagcggtgcgtccatcccggtcctctcgtactaaggacagctcctctcaaatttcctacgcccacgacggatagggaccgaactgtctcacgacgttctgaacccagctcgcgtgccgctttaatgggcgaacagcccaacccttgggaccgacttcagccccaggatgcgacgagccgacatcgaggtgccaaacctccccgtcgatgtgaactcttgggggagataagcctgttatccccagggtagcttttatccgttgagtgatggcccttccatccggtaccaccagatcactaagtcctagtttcctacctgctcgagttgtctctctcgcagtcaagctcccttatacctttacactctgcgaatgatttccaaccattctgagggaacctttgagcgcctccgttacactttaggaggcgaccgccccagtcaaactgcccacctgacactgtccctggcctggcttacaggtcgaggttagagcatccttcaaacaagggtagtatcccaacattgcctccaataagactagcgtcctatcttctctggctcctacctatcctgtacatgtttaaaagatactcaatatcaagctacagtaaagctccatggggtctttccgtcctgtcgcgggtaacccgcatcttcacgggtattataatttcaccgagtctctcgttgagacagtgcccaaatcattacacctttcgtgcaggtcggaacttacccgacaaggaatttcgctaccttaggaccgttatagttacggccgccgtttactggggcttcaattcaaatcttcgcttacgctaagctctcctcttaaccttccagcaccgggcaggtgtcagcctctatacgtcatcttacgattttgcagagacctgtgtttttgataaacagttgtttgggcctattcactgcggctaaccaatctcttggctagcaccccttcttcctaagttacggggtcattttgccgagttccttaacgagagttctctcgctcaccttagtgttctccactcgactacctgtgtcggtttgcggtacgggtatgtcatctctggctagaagcttttcttggcagtgtgattaccacaccttcgctacttttaattcactcctcttcacaactcgtgttgctggttagaagcatttgactcttaaccgcacttgttgcttgaacatcgttccatcgcgatgcgtgcttcacctcctgcgtccctccttcgctcttaacgatttgacacagtacaggaatctctacctgttatccatcgactacgcctctcggccttgccttaggtcccgacttaccctgggcggacgagcctgccccaggaaaccttagtctttcggcggataggattctcacctatctttcgctactcataccggcattctcacttctaagcgctccattgatcctctcgattcaacttctccgctcttagaacgctctcctaccacgtgctctttaaaacacatccacagtttcggtactatgcttagccccggtaaattttcggcgcagcgccactcgactagtgagctattacgcactctttgaatgatggctgcttctgagccaacgtcctagttgtctacgcaactccacatccttttccacttagcatagatttcgggaccttaactggtgatctgggctgtttccctttcgactacggatcttatcactcgcagtctgactcccgtgtatggatatctggaattcgtagtttatctggattcagtaacccctgacgggcccctagtccaaacagagctctacctccattatcctctccacgaggctagccctaaagctatttcggagagaaccagctatctccaagttcgtttggaatttcaccgctacccacaactcatccccgcaatttttaacttacgtgggttcggccctccagtgcgttttaccacaccttcagcctggtcatgggtaggtcacttggtttcgggtctacgtcacctaacttttcgccctattaagactcgctttcgctccggctccgtcttttctgacttaacctcgctagataacgtaactcgccggttcattctacaaaaggcacgccattgcactttaatgtgctttgactacttgtagacacacggtttcaggttctttttcactccccttccggggttcttttcacctttccctcacggtactggttcactatcggtcactaactagtatttagccttgcgagatggtcctcgcggtttcaaccgggattcctcgtgtcccggcctactcaggattctgctaggcgtgcttgagatttcgcttacggggctctcaccctctctggcttaccttcccagataactcaactatctcttacactgccacgtcgcagtcctacaaccccaaatgataaatcacttggtttgggctctttcctcttcgctcgccgctactaaggaaatcgatctttctttctcttcctgcagctacttagatgtttcagttcactgcgtcttcctttgattagctatctattcactaatcaatattgcatctctgcattgggttcccccattcggatatctccggatcactgcgtacttaccgctccccgaagcttttcgtagttcgtcacgtccttcttcggctgttagtgcctaggcattcaccgtgcgcccttttctacttgaccttactcaagaattctcttctcggtcgctctacaatctgttctctttgattgtctcggttttttgcttggattatattcagttttcaatgtactagctctttgatcctttttctggatcaatggaggctaacgggttcgaaccgatgacctcctgcgtgcaaagcaggtgctctcccaactgagctaagcccccagagtattttattttcggccagacataactttaactctttttcttcgttatgtcaatgggcctaaatggacttgaaccatcgacctcacgcttatcaggcgtgcgctctaaaccagctgagctataggcccgactaacgcttggcgtttttccaatctttgaggtactaccctcaaaactaaacaaagtttctcagtgtgcttccgcttgctctggatacttctcttagcattcctgctctccatatccttcgcttccttagaaaggaggtgatccagccgcaggttctcctacggctaccttgttacgacttcaccccagtcatctgccctgccttagacggctccttcccgaaggttaggccaccggctttgggcattgcagactcccatggtgtgacgggcggtgtgtacaaggcccgggaacgtattcaccgcggcgtgctgatccgcgattactagcgattccagcttcgtgcagtcgagttgcagactgcagtccgaactgagaacagctttcagagattcgcttgtcttcgcaggctcgcttctcgttgtactgcccattgtagcacgtgtgtagcccaggtcataaggggcatgatgacttgacgtcatccccaccttcctccggtttgtcaccggcagtctcattagagtgcccaacttaatgctggcaactaataacaagggttgcgctcgttgcgggacttaacccaacatctcacgacacgagctgacgacagccatgcaccacctgtcttagcgtccccgaagggaactttgtatctctacaaatggcactagatgtcaagacctggtaaggttcttcgcgttgcttcgaattaaaccacatgctccaccgcttgtgcgggcccccgtcaattcctttgagtttcaaccttgcggtcgtactccccaggcggagtgcttaatgcgttagctgcagcactgagaggcggaaacctcccaacacttagcactcatcgtttacggcatggactaccagggtatctaatcctgttcgctacccatgctttcgagcctcagcgtcagttgcagaccagagagccgccttcgccactggtgttcttccatatatctacgcattccaccgctacacatggagttccgctctcctcttctgcactcaagaaaaacagtttccgatgcagttcctcggttaagccgagggctttcacatcagacttattcttccgcctgcgctcgctttacgcccaataaatccggacaacgcttgccacctacgtattaccgcggctgctggcacgtagttagccgtgactttctggttgattaccgtcaaataaaggccagttactacctctatccttcttcaccaacaacagagctttacgatccgaaaaccttcttcactcacgcggcgttgctccatcagacttgcgtccattgtggaagattccctactgctgcctcccgtaggagtttgggccgtgtctcagtcccaatgtggccgatcagtctctcaactcggctatgcatcatcgccttggtaagcctttaccttaccaactagctaatgcaccgcggggccatcccatagcgacagcttacgccgccttttaaaagctgatcatgcgatctgctttcttatccggtattagcacctgtttccaagtggtatcccagactatggggcagattccccacgtgttactcacccatccgccgctcgctttcctaacgtcattaccgaagtaaatctgttagttccgctcgctcgacttgcatgtattaggcacgccgccagcgttcgtcctgagccaggatcaaactctcattttaaaaagtttgaatgattgctcattccttatttaagatctttgtctcaaatttattgcttgcgaattgacttcgcttcttgtttgggtttttacacccgcacacttttagcgaaactttgttcagttttcaaagtactacctctgtcttgcttttttgcaaagcagacagcttttatattttatcaaaccatcatttctttgtcaagaacttttttgatttgtttttttcgtcttgctcaagctttttctgctttcacctgacgacatttaaatatattaccagcttatttacttctttgcaagtactttttttctttttatttgttttctttccttacatgtctgtttttaagctctcgtcgcatctctcgaagcgactttattaatttaccttattttctccgctttggcaagtcttgctcttcgttcgcaatcttttagaaacgcttggacgcgctgtaattatttctttatttctatttcaatctacctttttctttttgcttactttatttttatccttacgcttattattcgagttttactgttttttctcttaattttagtacaaaatttttcgaaattttttcaaaataattcaaaaaacagtgttttgcctaatttttcactcaaaaatgcaaaaaaagacgtttatcaaattgatatagtcctactttagtagacagtacaaatatataaaattgtactatctatgaaagcaggactttttgtatgtctagaaaaagtaaatttagctatgaagctaagcttaaagcagttaaacaatacataagtggcgaagcatcacctgcttcaattgcgaaagttttaggggctggcaagactacactgcgccaatgggtatatgcatttaaagatcatgggccagaagcattaagaccacataaatataatcaaagatacagtaaagattttaaactcaaatgcatagctgcctatttaaatggcgaaggctcatatgattatctaacaaataagtttggtttgcgaagtgctgcacagttaaagcagtgggttatcaagtataatagtcatcaagaactcaaggactacaatcctattctggaggcttatatgactaagagaaaaaagacaaccctagaagaacgtaaacagatagtgaaatactgcaaggatcatcaatggaactacaaggaagcagctcttaaatttggctgcagctatgcccaagtatacaactggtcaaaaaaatacagcgcaaagggaactgacggcttagcagataggcgcggtcatcgtttaaaagaagctgagctatctgaaactcaaaggctaaagcgtgaaattgaacagcttaaaaaagaaaatgatattaaagaccaagagatagccttcctaaaaaaagtgaaggaattagaaaggatgtgtttgctggacagccaaaacaaagacaaatagcacttaaacaacagcagcgaaattctctttacagtttgatcaaagaatgtcaccgagaatataagtggtcaattgaatggatgtgcaaacaagccaatattgcccggtcagcctactacaaatggcttaatcataagccaagcaaacgtgaactaagagatcaaaagattcttaagcgtattaaagaaatagctgagagcaataacagcctctttggttctcctaagatgactttggctttaaacaatgagctagcagacggtgaggccaaaatataccgtagaactgtggctcgcttgatgtgcgtgaatggcatctatactagcaaggccagatttaataagaggtatcgctatcaagctgctagaccggaagaaactgccgaaaatctattgcatagagacttcaatgccactaaacccaatgaaaaatggtgcactgacattactgaagaaaaaattcctggaacaagtcaaaagatttatctctgtactatctttgatctatatgatcgtttccctgttggctatgctttaagcaagcgcaatgatacagccctagttaacgctgctctgtcaactgcttggaaaagagagcccaatagtcatgcaatgcttcatagtgatcgaggatttcaatttaccaggatgccttttaagcatgagctagaagaacatggcatgccacaatcaatgtctagaattggccgctgtattgataatggcccaatggaaggctggcaaggtttaattaaagaaatgcgagaagttctttatccgaaagcaaatagctatgaagagatggaaaaagcctttaaagcaagtattgaatactatattaattatgatcctcaggagcgcttcaatggcaagagcgcaggtcaggttagaaaagaagctaagaataatccagagaatataatttcatatccaataaaacaagataaaagatataaagacttttggaaaaagattgatgaaaagaaaaatcagctcgcacaatagcgaactgattaatcaaattaatttatatatttaagctgtctacttgacacggtacggatcaaatataatcattcgataaacgtctcattttatatctttagatgatcaatctttagtgtctattcatcttttttcttacgtttttcaacgccaagtaaactaatccaacctaaaccagcgagtaatgtaccaatcaaacctagtgtgtgtttgtgttcactaccagtttgaggcaataaatcttgcacggacttcggttttgcatttaatttgttagctaattgctttctttctgttttccctattgtcctcttgccagattcaatgtctgctgccttaactgggccgttagcgcgtttctttcgacctgtaggcataccttcatgcttaggattgttattagagtcatagcccttcttatttgctttagaatgattatgcttcttttcactttccttatttggctttgccggtttatctggcttcggctctggatttggttttggcttcggttgaggttctggttccggagtaggtacttcatcttgcttgtaagtaattttaatattactatcagccgtatctactgaaaccttttccgctgccaccttactttgtgaagcagtgtagccactaaatgttggagcagtatatgcatcccactgagtattaccatctaccctccactcactgtatgtaactttgccagtaactttatcaaacgttactttttgcgtggtaatcagcttaccacctgaaggcgtaatgactgtaattattctagttggagtcttagtcaaagtatccaagtgatcatagttcttacttggatcaccttgcactgggcctgttggaacatcccttggtggagtttctggagtaacgataatggtgtcgtgttcaacccttacagttacagttggaatgccatcagcagttgcaactactgtcttagaaatatcctgtcctgaaacaatcttccatcctgctagagcttgtggatttacatctactgtttcactggtcttgccactaagcggagtttgccctacttctttgccatcactatcaacgtaagaaatcttccccgtttgagtgttgacagtataagtagcagtgacttcactattggcaaccagctttccagtaaccaagtcatatacggcagtccgcgtaaattcaacggtctgtttcttttgatcttctgaaatctgagctagttggcaattcttgatctggtgctaactcgtagttctctggaagcttcaaatcaaggttatcaacagttgagccagcaacgccagacttagtaattgtctgaccaacttgcttgttaccttcttgagtatcttcaaattcaatagttaaagttgcatccaaagtaaacttagcctttgaagaaatattcagcttgtagtttggatttgctttttcaagggcagtaatactttctggagttaagttaattacataaacgccagattcagctggaattccatttgcaaattcataagtcaaacctgccggaactgtaatagcagttggaacattaactttaaagtttgttccatcaattactggtacagtgctttcttgactaccagaaatcgttacattttcttcagctggactaattacataagtgaattgaccactttcagaaactgcatagttaggattatcatcttgcaatttcttcaatcccttagcagttaaggcaatgtagtaagtaccggcatttgttggcgcagaaattggcttaccattggcatcgacccattcataatcaccagctgctaggttagcagtattcaacatttcaccgcttactaaaccagttggagtgaatacaccgaagttggtagcttgagtgttaatcgttgcaggttgaccatcgtacgtcttgccatctgcgcccttactattaccgtcaagaactacattaagatccttttgtttaattgtgtaagtggcagagcctagcaggtcttcagcatccaaggtgacatttccttgaccagcgtattggttaagggctttttgcaagttaacaataccattggcactcagcttaatcgtgtaagtaccagcattaactggtgcgctgccagcattccaaatataatcaccgtcttgcagagcatacgtactttcggtagttgaacctgggaaagtaaagtgaactaaaatttgaccattgctgttaacttgtgcagttgttacagctgtaccatcaaatgtcttttggttagagccattaagttttgcgtcagcagtggctgcagtaactatgtagttagctgttgtcttaaatgtccacttgtagttagcaccattattaccagttagttgcttaagcttttcttgaccagcctgtgacaatttaacttggtaagtaccgacattcgttgcattaccaacaatttgcaaatcgtcagcagttaacttaagtgtctgagcttcaccatcagcggagtaaaccgtcgcatcgtaggttacgttgtacttattcaagttaagtccacttggtaaggtttgcttagcatcataagtcttgctgtcaccactattcagggtaacagtagcttcgccctggttaatggttaatgtacccttagtagttacatcagctgctacttgtgggtatgcgtagttagtacccaaagctttttcaatgttatccaacccttgcgcagataattccacgtggtattcaccgacattgcctggggtttgatcaaagatcaagtcaccacctttagcagtgtagcttaaattagtactattagtactatttttaccatacgtatatttacaacaacataatccttgcctggatcaggaacattaacttgccaagtttgtccagcttctttaggtaggctccatgaaccataaatcactttaaatcctggcgttgttgaatcacctgctgtttgatcccattgccaattaccataagtaatcgtgttattagcaacatttaaactaccagtctgggcatagaatacctgtatttgtgaatcaggtgcaaattgttgaccattcttgtcaccaccagcaattacatatttagccgttactgttctcgcttgctgttttactggaatatacaaaacagtgtgaactggacgggcttcataaactgaggcgttctcagtatatgctagagactccttaccctcactagatgtatcttccttattccaagttgggtaaacaaattggtttgctgacctggatcgccgctcttattgtaagcactataagaaacttccttattattttgagtagaaacatctttagtatcttctggactagtagcttttttatcttctgcctgtttagttgaattctgctcggttgaatttttgctagtcaaaggatcggtaccgctaacttctttttgagcagtagtatcgttatcattcttatcagctgtcgtagtctgatcatttccagtatctgtggtagtcttcttagccgactcaacctcttctgtttttactggatccgtagtatccgcatgaaccgtttgacttgtattcatcgtccaaagcaaaacggaacaaactccaatgttcaattttctaatactaaagcgctgcttgccttcaaagtcatttttattaaaagtcatagtctctcaatccccttaagttatgttttatctctaacttatagtctttctattacgcggttttattctattcatctattttaatcacaacaaaaaagcaggcttaaattatatgcaaaaaaatcgttattttaagttgtcagtcacaacaactaaaataacgattttattgtgctcattttttaattaaatttaggaattaaattaaacctgattctttagtaatcttcttcataccattcatgtaaggaacaagtacatcaggaacagttactgaaccatcttcgttttggtaattttccaaaatagcagctacacaacgaccaacagccaaacctgagccatttaaagtgtgtgccaagtgaagcttgccgtcttcatcacggtaacgaatttgtgcacggcgagcttggaagtcagtacagtttgaacaacttgagatttcacggtacttgtcttgtgcaggcatccaaacttcaaggtcgtaagtcttagcactagtaaaacttgcatccccagttgaaagagcaactacgtgatatggcaagcccaacttttgcaataagtgttccgcattatgagttaacttctcgagttcatcccatgattcgtcaggcttacataccttaaccatctcaaccttacggaattcgtgcattctgatcaaaccacgagtgtcccgtcctgctgaacctgcttcacttctgaatgctggtgacaatgcagtaacattgattggcaacttgttttcatgaataatttcatttctgaagtagtttaccaatggaacttcagcagttgggatcaaagttaagtcacgtggcttatctggatcgtcattatcaacgatggtataaacatcttcgtggaacttagggaattgaccagttccttgcattgatgcatcgtttaccaagtatggtgggataatttcggtataaccttccttagtgttttcatcaaggaagaagttgaagacagcacgttccaaaagcgcaccagcaccgatgtagtaaacaaaacgtgcacctgaaacctttgaagcacggtcccagtctaagatgccaaggtcagtaccaatatcccagtgagcctttggcttaaagttaaattcagtagttgggtgccacttacgaacttcttcgttgtagctatcgtccggaccaattgggtctgaatcagctgggaagttaggcaatctaagcaagatgtagttttgcttttcagttaattccgcaacttccttatctaagtctttgatttccttacctacttcacgcatagcagcaattgcatcgctagcatcttctttgttacgctttttttctgcaatttgcttagaaacatcgttacgcttagcttttaattgttcactcttagtcaaatcttgacgacgcttagcgtcaatttcaactaattcatctaattcttctggcttaatgccacgtgtagccaactttttctttgaccaatcaagattctcacgaatcactttaatatcaagcatataaaacctccgtaatatgcaaaaaagagccgacttatccctacacttgggacgaatcggctcttacacggtttcgcggtaccacccagcttcagtctatctagactgcacctctttaccagacgagtaacgacgtcaaaccgtgcaactattaattgcccacattattgaaatctggaagcgactatgcattcactcgcaccaaccgtgaactctctgaagcagtcttaggatttcgtgtttgcatttattttaagccattcttcttttttgagcaaataatatttttctttaaacgaaaaaagtgcactaacttgtgtgtaatcgacagtataaacatactgaaatcctagtgttttaagcaatttctgtgatttttcattatcggcaaaagttccagcccagacttctacttgctttttctttttaaaagcataggtcaaaatcaatcgtaaagcttcagtcatatagccgtgaccttcaaacgactgatctagcaaaaagccaacttctttagtctttaataggccactcttttcatctaagccgcgttcatacaattcaaccagaccgatcacttcattgttcttgcgcaagcaaacgacataactttcaggacgcgacatatattgcttcacgccattaaccgcctcagtcagattgcgatattcctcaaagccagccatcttgtggtagcgcggattgccaccccacttcaataactgctgtgcatccttttcttcaaaaggtctcaaatatattctcttagattcaagcattagttacccatcagcttcaagagccactttgcaccaaactgtaggcctatactataggcggcaattgtccatggcttacacaaaataataatccaaaaataagtccaaaacttcattttagtcaatcctgctagcaggcaaagcacgtcatcgggagctgctggggcgagaatacataatgcaaagaaccaattaaatttattctgattctctgtccacttcatatatttatcaagcgtttcttccgaaacaatatgcaaaataaagggccggccgtagtgtctagctaaaaagaagttgataattgagccaatacaaatccccacgtagttataaataaacccagcaactgggccaaagaagaccacgcctcctaataaagacacgcccccaggaataattggaataactacctgaacaatttgaatcaacacgaaaataatcggaccaacaatttgtttattagccagataagcccgcattttagcttgatcggtaaagatccccaagcggtaccaataaatcaccagcaacacgattgcgactccacaaactatagttgcaatattgattaatttacgactagccttagtcgatagatgcattttctcgccttccttcatcgcctagtagttcaattttaacaaaaatccagcccagataccgtaaacatgcaaatctaaaaaaagttttattattttagctactttgggcagatactatataataaagttaataagttattagaaaggtaggcatcttatgagactgtaaaatagtttgtgtaaggatgaatgattccttaaatttatttctttaaacattagaaaaaggagttcctttctcgtatgattggtttgaacaaaaaaaacacatacagaaagaagaactccttcatgaatgattttaccaaagattttgctcaagctctattcaatccagacaaaataaatgatttattgcgcaaagagctacaacaggctgttaataacttgctagaagctgaattgactgcctttctaggctatgatccctatgccagaaatggctggaatactggcaattctagaaatggtgcttatttccgcaaggttgatacgcagtttggaccaattgaagtgcaagtgcctcgagaccgcaacggtcagtttcatcagcacacgctgcctgactacaagcagcactctgatgttttggaaagcacgattatcaagctctactccaaaggcgtaaccaccagagaaatcgctgacttgattgagaaaatgtatggcagtcattatagtccagctcaagtatcaaatatttccaagcagatgctccccaaggttgaggcttatcacaagcgcaagctaagcgacaagtttttctgcgtctatttggatgcgacataccttcctttgcgccgagaaacgtttgagcgtgaagcagtctatattgccattggcatcaagcctaatgggcacaaggaggtcattgactactgcattgctcctagcgagaacattgaagtctggacagagatgcttcaaaacatgaagtccagaggcttgaagcaagttgaactctttctttctgatggtgttgttggcatgaaaacagccttggccaggacttatcctaaagctcattttcaacgctgcctggttcatgtcatgcgcaatatctgtgctaaagtccgggtggatgaccgcgaaaagatcatgaacgaattcaagcagatacatcaacagacaagcaaaaaagaagctgcagctgtcttgcacaaattctatgccaaatggaataaagcttatagccatgtcatcaaaggtttgaaggaaattgagcccgatctgctggtcttctacaattatcccaaacaaatcagagcttcaatttattcaaccaatatgattgaatcctttaacaacgtcatcaagcgcaaagctaagcctaaggcagaatttccaactgaacagtcgcttgatgcatttattggcatccaggcaatgagctacaatgaccgctatttcaaccgaattcataaaggctttggtcaggttcaggataccttagaatcttattttgaataaataattaaaaaatcaatttacgagaaagaactatttacacaaaagatttgacagtttcggttgactttggaacgaattatcaagtttatgtttgacagtattggtagctatttatccattcgaaaaattgccaatacgttaacttcaatgggacataaaatcacaccaaatacggtagaacggtatattaatgcgttactcgacagtttgattatctatgacgtttcacgattcgatattcatggaaaagagcagctaggttcgctaaaaaaatattacattgttgatactgggcttagatatcatttgttggcaagtcacaaaaaagatcgtggacatataattgaaaatattgtttatcttgagttgcttcgtcgtggatataacgttactgtaggtagcatccctaatggtgaaattgattttgtcgcaagaaagaataacgaaattttttattatcaagtgtccgaaacagtgctagatgaaaagaccttagagcgcgaattaaaaccgtttaacaagattaatgatcattatccaaaatttctattaacaatgaatgaatttggaaaaaatgataattttaacggaataaagcaacttaatattttagattggttattagaataattaagctaagattaagaataataatttaaaaaaagaattcgaaaaatccccatttgtagtaaaaatgcctacaaaatggggatttttttagataatcttgtaaccagtaactggcttagcaggtactgtattgaaatcaaagttagcaagtttgtccagttcagtattaccatcaataattgtagtaacaccttgagcaatcatcaggttcattactttatccttgtctggatccttagtgaaggttaccaagactacaggcttatgcaaagcacgcatgaaaccaatttcaaaagcactaccatcatctacattgtccatgtcatacaagaagacgccacatgtagagttaactagaccttccaggtcattgttataagtggcaaggcgccaagtcatgctgcgaatgccaccaatttcaggattcttttcatccggatcaacaaaattttgatcaaatggaaaatgcactctgaccactgtcggattttcttctaacaaggcacgagccttatcaactcgagcacgttgatcatcattgtaaaatggagtgcctaaataaatcttagcagttgaaacttgtttgttcatgcttttgtcccttcaatgtttaaaacttacaaaataaaattattttcgtaaattgcaataataaattgaacacttatgctgtttgatagatacgatccaattccttttcaaagatttcatctggtgtatgatatgccaatatctttcttggtaaagagttgcaccaggtttcaatgtctatgatgtcttgtagtgaataattgtctattgcctctcccttaggaataaatctgcgaatgagtccattatgtctttcaacggttcctttgtcacaagatgtataaggatgagcataataaaccaaggtttgggaaatatcttccagctgagatagatctgcaaattcagagccattgtcagtcgtaatagttttaaagatatcattccaatgttcgctgtattgcctttggagttctttaaaggcctgcatgacactgacagaagtcttgtcaggaatacgaagaattaagaactcacgactcatacgctcagataaggttagcagcacctcatcatctttgctcttatgtccgagaactaaatcgcattcccaatggccaaactcattacgtttattgatctctttaggacgttcttcaatgcttctgccaagttttttcttatttttgcgaacacgatgaagcttagtattgcgtttaagcttctcaggcaagtcgtaattatgtatatctaatagaccttgatcgacataattataaagcgtcctggtgcagacaatatcgctgctggcaaattcacccacagcagtgcagcgattactgcagacatcgagtgaccagccatcttcaaagaagtgccgttgaacgtaatcaataaatttgtgctttttgagaaagtcagattttcgaccacagtgctgacgatggttttgataaacgctttggccttgctgggctttataacgtttgatattgccatgatacagcttaacggttcctcgcttaatctcatagtgaattgtactaggagaacaaccgatttctcgtgcaatggagcgtaaagagcaatgatctttcaaacgagtttgaataatgactcgttcttcgagcgataaatgagttccttttttgcgcttgtccatgataaaatgtagtgagtccattttgacctccatagatgtttttgtggttattaacattctatcaaacaggtccaaatggacttttattttctacaaagtgttcaagttaattttacaatcggcgataaaattatttttcattttagcatgacttttttacaactaaaagcacaaatagctgtgttttcattgtaaacgctttataatagaaacataacttataaagctaaacataaaacttattggaggaattattttgtttagatatcaatcaattaatccatatactaacgaagaatttgcaagctatgacaattctactgccgcacaaattgacgatgccattaacttagcacacgctttatataaaaaatggcgtcatgaaaatcctgagacccgcagtcgtcaattacataagatagcagatgctttgcgcgagcatgaagatgacttagccaaaatgatgaccctggaaatgggaaagcttttgcgcgaatcaagagaagaagttgaattatgtgtttcaatttgtgattactatgccaaaaacggggtcaaaatgttggctcctactccaatcgaatcagacttaggcaatgcctattatttgaagcaatcaactggcgttattatggcttgtgaaccatggaatttcccactttatcaagttattcgggtcttcgctcctaactttatcgtgggcaacccaatcttactgaaacacgcccacaatgttccaggttctgctgctttaaccgctaaaatcatcagacgtgctggtgctcctgaaggcagcttaattaacctttatccaacctatgatcaattaagcgatattattgccgaccctagagttcaaggcgttgcattaactggttcagaacgtggcggttcagctgttgccgaagctgctggtaaaaatttaaagaaatcaaccatggagcttggcggcaatgacgcatttatcgttttagatgatgcagatccgcaagtattgcgtaacgttttaggcgatgctagaacttataacgatggccaggtatgtacttcatccaagagaattattgttgaaaaatctcattatgaggaagtgctacatacgcttaaaaacggcttttctaatcttaaagcgggtgacccacttgaagccgatactaccttgccaccaatgaattccgaacgtgccaaggaaaaattagaagctcaggttaaaaaggccgttgacgcaggagccgagattttttaccaatatccagagattgattctaaaggtgccttcttcagacctgtaattttgactaacatcgacaaagaaaatcctatttatgatgaagaattatttggccctgtagcagaagtttttgtagttgacgatgatgacgatgccattcagcttgcaaatgattctagctatggcttaggttcatctgttatctctaacgatatcaaacgtgctcaaaacgtggccgctcaaattgaaactggtatgactgtcatcaatggccgctggattacctctggtgaattgccatttggcggcgtgaagaagtctggctacggtcgtgaattaagtgacttgggcatgatggcctttgttaacgaacacttagtaattgatgttactaagaataatcaatagtaatttttcgataaaagaaatacgctggcaacttaaccagcgtattttctacccaaagtcaagtattatcagtgatttaatggattaaaaaaattgattttttagtttattaatgatgcgaataggtttaaagaccaaatactaaataacggaaagtactacaaataagcctatgaatacttgtagtttttccataggttgcttatacttaagttgattatttgatttcagctaaagtcttttattttcggtggctacgttgtaatcatataattgatcatgtttgataagagcaaacattgtgcgtatcagtttatggactgatgcaatggcgattttcttatagccttggctatttgaagatcgttttttcttgtcataataatcagttatatgacatggctgtgtagcctttaccgtctccatttgagtaataactcgataaagtatttttctggcaatatgattgccatgcttggtaatgccaagagaactgtctttttcaccagattggtaccttcctggatcaatgccaacaaacgcatcaatttgagctgaagtgctaaaccgtcttagatcaccgagctctgctactaatctcactgctgtaattctagcaattcctgggatactcaaatagatggataaagcacgagcgtttactgttttagccagcttttccatgtagttaattacatagtcgcgttcttgctggagtgaaaacaaattagaaatgttcctttgaatagctctaacgataatactatctttggaatcataaggataagcttctctagcaaaagcgtataatcttgtggttaagtatcgtgccctttgttgtcctattccagaaatagaattaagcatttgagttacctgtgtctcattcttttctagaacatatccagcatgtgggaaaagactaacaagcgcccaataaattctgccagatggatgagacagtatttcttcaatttgtgggaaagtggattgaaggttgcggtgcaattgatttttagtagtaactatattcctagtaagctcttcataatagcgactggcattctgaagttcatgatactctctgggctgtggatcacgcagcttttgcggagcattaaattgaattaaagccaggcgataagcatctaccttatcagttttattatgacgcaaattattgtccattagctttttcgctttaagcggattaagcttcaaatacttaatatgataatcctctaagaaagcttgcaggcttagagaataaacaccagtggcttcgaaaacaactaaaggagttatcaaatattggttcagttgctcataaagtttttgatagccaaaggaatcattagaaattttaaaagattcgccttgtttgatccggtcattaaccacacaaactgtggaagatttactgctaacatcaataccgaaaataatttgtgattccataatataacctccgctgtgaagataaaactctttatcaacctattaattctaattttctaaacacgacatctaagtgtccacagacttcgaagagacttaagaataggcggtaaagcagtccgtttcttttacgacatcaagtgtctaaaaagctgaagacttgatttgctttatcttcactttctattttagacaaaataaaaagtgtcagatcgtgaatccgtcgattcataatccaacactaggttagtatgtttcttttacttattattaattctatttctttttaaaaagattatatccagccaaaatcgtggtcaacacgctagccaaaatcataaagtaagctgaagccccaagagaaactgcatatgacataagctgactcgtcaattgagccagcaccccagttgaagcatgtgctgcgcttgatatttgaaaaatcatataaatcaaaaagattgattcaatcaaagaaaggaagaaggccaaagtctgactagccttagtatttttcaaaatattataaataatgaaaattgggaacaagaatagtagcaaccagacaatgtaaagaataagtgcataccatgatgtcacgccagatgaaagcaagcgccctgctaaaccgaacagtacattctctgcgtgtaagccgaggcacccgagtcggtaaagagaacgattagactaactaaagccgtaaaaataactgaaatctgcacgtaattgaagtgatgcttgcgaacattttttatttcacgtacatgattttcaatccgaggatatttttgcacaaattctcggtttttcgctttgactttactttcacgtgcatccaaccggttaaagacatcggaaccaattcggtcaatcttttgcgttaatcgcttatcaaccgtatactgctcgatcttatctttacgatcacacacaatataaagccaaaccattagggctaaaaagccagtccatcctgccgctctagaaaaactcattaggattaaaagtaagactcccaataagaagactaaggtcgcatttttcctaacccacgcaatcattctttggacagtggtgttttgcttttcaggaataaattcttcccgataggctgcacggctgataatcttttcgccttcatctggttcttcaaacttggctttttggtgctgatctgtgaaaaagtcgtctcgatatttttttagattgaagccacagtttggacaaatatcatctgtttcactaattttatggccacaatttggacaagtagtcatataagaattcccttctttttcaatctgttagtcattattataacatgtatcagaatttgaagatcaaaacaaaaaaagaccgaatcattgcgattcggtcgaaaaactatttattaattatttttcttatttcttcttttggcgaacttattaaggtcgattccctcatatgtcaacttagtagctgctgacatagtaattggcaaaatgaagaccaagatgagcaaaccaatatccacggctaaggcaacttcaatcaaagttggaatacctgatggaatcaaggctgcaaaagtaccacccaagataattgcggctgatataacaaccgtaccaatgatagcacatgccttcaagattcttgaacttggagtagtgtagccttcagactcaagttcacgataacgagtcatcaggaagatactgtagtcaacacccaaagcgatcaacataatgaagctgaagaatggtgtgttccaagtaagcattgacttaccaagaactgctttaacaatccattgattgattgaaagtgagcagaggtaagcaataagcaaagtcccaagaatgtagattggttgcaaaagtgaacgagttacaaacatcaaggcaatgccgataccgattaacatgatggcagcagttctaaggaagtcgccactggcaactgtcttagtatcttcaatcttggaactttgaccacccatagctaccttagcattcttcaaagcagtaccttggaatgacttcttagccatagcacttaattcttgtgacttcttagtagcttcggttgcacttgggtttgaatcaaagacaacaataatttgagctgacttcttgtctgggctgaggtaaacatccattgacttcttgaacatatcgttcttcaagaattccttagggatgtagaaagtatcagcggcagctgatgaacctaaacctctgaggtaggtttcaccttgacctaaaccactattaacagtgtcaatacctgaagtcaattgtggaactttgcttgccaacttaccagcgccagcactgagttgtccagcacctgtgttaagttgactgatacctgaaataagttgtggagcttgaccagctaattggccgataccactattaagctgaccggcaccagtggcaagagtacctaagccattgttcaaagttccagcaccatttgcaagagtgccaagaccattgttcaacgtacctgcaccgcttgcaagagtaccaagaccattatttaatcggccggcaccattattaacttggtttacacctgcaccaaggcgactagcacctgatgaaagtgaaccaaggccgttactcaattgaccagcaccgttattaagcttttgtgcaccagctacaccttgtgaagcagcagattgaacttgagttaagcctgaacttaattggttcaaagctgttgctgcacctggaagagccttgtttgaagcttgagctaattgagctactgcttgcttcaattgtgaaacttggctagtcattgatgataacgaattagtatcaatattgcctgcagcagatgaagatgaattcttaacttgaccagaagcttgatcaccaacagcatttgcagctgccttggcagctgctgcttggctagaatcaatctttacaccactcttttcaagagcagcaatagctgcatctccagcggctgatgaagcttgttttacagcacctgctgcttgatctttagctgagctttcagctgctgaaatcttgtcacttaatccagatagttgtgaagttaaaccagaaatatctaagccactaacttgttgattcaactgttgaataccactattgatttgtggcaaagcagtttgaagttgggcaagttgttgcttgtttgaaccactcaattgagttgaaagttgtgaactcaattgttgcaattggttaaccatttgttgggtaccactttgcaaactgttagcaccattcttcaaacgatttgcaccgctaactaagctggttgcaccactttgcaatgcatgagtaccactttctaaacgacctgcaccagtttgtaaacgaacagcgccgctttgtaattgaccagcaccactacgtaaacgatcagcaccactaactagttggcctgaaccactttgcagacgagttgcaccactttgtaattgactagcaccgttttgcaaacgattagtaccactaactaattggctagcgccactttgaagacgactagtaccattttgaagttgatcagcgccatcctttaagctgttagcaccgttagcaaccttgtttgagcctttgctcaatttacccaaacctgaacgagcttgatcaacaccgtcgttaaccgtgtttaattgattgttgacataaagcatatcaattggttcgccgtaaggttctgtaacagatgtcgcaaatgaaacgtcttttgaagcttgaagttgcttagtcacttgatcaattaacttcaaattttcttcattgtctaatctatgcttgctttgaatgtacaagtatgatggttcagccatccctttagagaagtgcttttgtactatcaacaaaccttgcttagatggaactgaatctgcaatttcatcagtgtcatcgtagttcaagtgacctgagtacattaacatgaatggcacaacaacaactgctaacacaaccaagtaaataattggatgcttcaatgtggcagatgaaataccatgccataacttgtcatcactttcaccagtaaatttcttaactggccagaacattttcttaccaagcgtagccatgaagaatgggttgagtgttaaaagcactaccaataaaacagcaacgccgaccgcaacaccaacagctgattggtaaacggagaatttagctaaacttaaagcagtaaaaccaattaagatggatgaacctgagtaaagaattgttttaccagcattgcgcaaagcgtcatgcatggctttatacttgtccatcccttttcctagattttctttaaacttgtcatacagcaaaatgttgtagtcggtaccgataccgaagagcacgataaccataaacacttgcgtaaagtttgaaaatgggaaattggcgcttttaactaaattagtaacaattgagaaggaagtaaggaatgaaacaccaactgtcaacaatgaaataagtggaacaattggtgacttaaatacgataaccaaaacaataaagataaagacaactgtaatggcttcagtcttcttaattccctcttgaattgaagcggagaaggcgtgctgcaagacatccgcacccgttacataagtacgaagcccttgcgttttcgcggccttgttcatttcgttataaactttttcaatcgtgccatgactcttagccacattaaattgtgctacccaagtcgtgccatcttttgattgaagtttctttcttgtagcaatattggaatctggaagtaatgaatccttgattccgtacttgcttttatcattagtgaacttatcaagcgtattattaatagcctgtttatcggcatcagttagcttgccactctttttgttaaaaacaagtgctactgcataagtgtttttctttttcgagccccaattgttctctattgactgtgccacattgctttgcacattacttggcaacgtaatgttagagtgatcattagtcagctgcgtaatgttaggcaaagcaacaacggaaataatcaatattaaaatccacgcaatcagttcgaaaacatggttctttagaaatttctgcactttcctatttcctccctatttgttgtaaatcaggtactggttctacaagtcgtaaaatcatttcatgataattacgattagattcatcttctgtttcatctccaaaagacttcgatttatccagaaaaacgtaccctaatacggcgccaattaaagcatgaaatgaaatgacactttctttcttaaaattaaatctttcacccattttaattaaatccaaaatctcttgattgatggccgcatcctttggatattcgttcaaatgatacagaatacttgataaagccggatcgcttaataaaaagtcgcgcacaacatccgcaaacttaagcaatgcatccctacctgacataccaattaaatcattcatcaactcatgacgtaagatcttaatccgtcttgcaccaactagtgatagcaattgtttgcgtccggaaacgtaatgataaagcgactgtgagcggacatcgagcgccttagccaatgctggcaaagttgtagctgtcagtccttttttagaaattaattcagtagcttgatcaattattttatccagatcaagatttcttttctgtgccattttcatccctcctttgtcttagcatagtaaataatatacacctacagtgtgaagattacaatctacatagtgtaaataatttattttttctataaaaaaataatgaagccttctcggacttcatcatttccgttacttatgcttttttataaaccaagcattaaccgttttgcccaatttattaaaattcttgtgttgcgtgctccaaacagacatacagtaagcacgtccgttagtctgtacaattgcgacagcaaaatcatcatcaccaattgcataaatgccgccacttaagccagaaactaaacttggtcgctctttagctagggttgctaaaactcggctagcatattgccgatttaatatccgaccttgatacaagccaatcattgttttagctaaatcattagctgttgtctgaccagtcatatttgagttgaccttagtttgagtggcacccatttttttagcaacttggtcaatattattaactccaatttttctagttaaggcactagttgcagttttgttacctttaagcattgcgctgcgcaaataacttacaccataggtaataccaatttgaaacatcttatcacccttggctttgtcttttttgctaatcttaatcgcagttcgcgaccccatcttgcctttttgttcttgctcatacaaggcgatcagtaaaaataaccgcattgtttttcctgcgtcatgagccttattagtattagaaactacggcaaagtgactagagttagttaaatcctgtgctactacctggaagctatcatcaatgcccataacttttttgatttgcttgactagcttctgattactgcctttttgagctttaacatggttagaatattcaatcgaattaaccttgggttccttaggcttttctaattttttaacctttggttccttggtcttctttttattcttagcgaccttgctgttatttggttcaacaatctttaactgcgcgttttccacccgctttatgtttgatgtatacaaaatgaatgcaaataaagtcacaattaaagaaccaattaatattttatgtttcattaaaacgcctcaattttagaagaaatgatgccttttcatcaaaatgactaaccaaaccattaaaacaaccatcaaaataatgattaaaacccagtcaaatgaattttttaaaattggtagactaacattcatcccataaaaaccggttaaaatagttggaatagttaataccaatgaccacacagttaagaattgcatggtgtcattcaaattattgttcatcatattattactggtagctgataaagtcttagttacctgctgggaaatctgcaccatttctgcagactggcttgattcaatcaggacgtcatccaagcgttcactggcttctttagtgaagtctaatttgctgtgattcaggccatgcaacatgattaaatccgtctgaattgaacttgataaataaactaaacttttttcaatattcgaaagttccaccaaatctttattgttaatgtcatcagacaacttctgatctaggctgttacgttcaacgtcaagttgcgttacggcacgctggaagtattgtgatgaatataggaaaaagagcatcaacaactcagtaacatctttagcttcagacaaacgctcccgcatatgttcatcgttgaattcatcaaacacatagctggttgattctgtatggaaagtaaagatattttcacccactactaaaaaagtgattgggtgtgaggtaaagtgcttaatcgtgttggtcggccaaattggcacatcgtaaacaagcaagtggctcttagtatggacgtcatagtcatagtgaggacgttcgtgacggtcagaaatataagagataatgtcaggcgtaaaattaaaatcctgctgcaatctctcactgtcttcttcacttaaattattgatgtcataccacttatactttgttcttaccggaaaattttgttgtctaatcaaccagctcacctcaacttttattttattacctagtaaatggtaccatttttctcaattctttttccacaaaaaaacagaccttacggtctgctctttgaaatctaattgctatttaattttattgcttccaagcagcatcaaatttttgcttaccagtattaatttggctgttagtattttgacccttttgggctgcagcaaagatattttgcaaaatgctgttcaattggttgtatgcagcatttgaattcttagcaacaggaacactgtacaagttcttcatagcatcttcaagtttagcaggaagcttgatgctcttgttattcttgtattcactagattcgattgcactattgtttacaggaatgtaaccagtagcattagcccacttaatttggcttgacttagatactaagaacttaatgtacttaaatgcagcagctttttgttcagcgctagcgtggttaaacatgtaaatatcagtaccttgttgcatggtgtatttgccaggacgtggagcaacatcataagtaaacttgttacctacaccttgcttaacaaagccttcacctgcagaagtaccaacaaacattgcaaccttttcgttagcaaatggacctgaaaggtagtgttctgaaccagctactctgaagtaacccttcttaataccatctgcatagaagttgagaactttctttgaagttgaaccactgaagttaatcttatcagtaaagttcacgccttcgtccttcataccaagagtgtagtagttggataatgaatcaaaaccagcacctacaactttgtggttactcttcttgtagatagtttctgaaacatccttaagttcttccatagtagttggaactttcttgatgccatatttcttaaacatggtcttgttgtaagtcaaagtttcaattgacttgttaaatgggataccgtattgagttcccttaatttttgcaccatcaagaagtttagttctaatgtcagatgcctttgcactgccccaaccaacattcttgttgttgatatatggggtcatgtttacaagcatcttgttttgagctgcgttccaaagccaacctggataagcttgagtaatagtaggtaagttatttggtgattgcaaagttgagttgatcttagcttgcaaatcattgtatgcaccttggttttcaagcttaacagtaattttagggttcttcttttcaaattcattagttaattgctttaaagtagaaccttgtactcccggcatagcgttccagaagacaactgtagtcttcttagtaatctttgatggaatcttctctgaacttgatgaagaagaattgccgctctttgaacaagcagcagtgccaactagggccaaagtagcaacggcagccatagtaagtttcttactaaacttcatttggataaatcctcccaaaaaataaaactaaacaacaatatatttttgatttactaaagcgtgattgtttgaccacgtttaggtaaaatccgttctccatatgggttctcttccagctccggatgcaatgtgtgcaccggtactaaaacagctggttgaaccccagcaatgatttccttgagttctttttcatcggcatggcctgaacagcgcaacgccttatactcaatatcattgttagctaaagcctctacaaatggtttgtaggcaggatcaaaatcccctaatggctcagcatttgagtggatatacaaaccacccttttgcagcttatcataatcggtgacaacttgccacatgtatttatgattatctgctaaaagctcatcatagctaacttctagctctggcttaaggtcagcatagtgctcctcattaggcatgtaatagtaaggatagtcttcatccaaactttccttaatcaaatgggcacgctgagcatgtaaaacgacctttcttggtgaatcggcaatgattcgcaataatcgttcaacattagtaggataagtattaaaagtgatttggcgttcaggattagccttttgcaggcgcacgatttcttcagttagttctacttcattcttagggccagtaaactcttcactgttttcatcatgcttttcttctggccaagaaacgccagtgccttcaataatcagcatatcgctatttttagctgcctgcataaagtcccgcacccaatctggatgataaccatgcaagcgaatgtcgccagtataggcgatttgcttatccggtgtcttaactaatagaccagtagcaccgtaagcgtcatgatcactaggatatatttccaggataatatcgcccaccttaattggtttcttgtattctgccgcgatgattggacgagtataagtccgatcatgacctgcagcaggaagcaagaagtcgcccttttcattcaaggctggcaataaatgagctgtaattggacctgcataaagtggaatttctggggccaaaaagttcattgccttactgtgatccaaatgtaggtgcgaaatataggccgccgcatgctcccagcggtcagtatcaattggcttacccgttaatttaggatcgtaaaaattaggcacatccccgattaatttatttttaatcagagtttgataactttcatctggcaattttaactctggccgataaacttcccccaagtcaaacaatacatgcgacttgttataggccacttcaatcatcggtccaccaattgtggttaaaccattataaaaagttactgtcgttttatcctttaaggtcattgcgcactactcctcgaataatttgctttctaaagatgaagtacaaaatcaagattggcaaaacagtcaatgtggcagcagcaagttgaagttgagtttcactacctgcatcagatgcaaatgaagttaaaccattgttcaacaatctcatgctgtcttcgttagttaccaataatggccagaggaatgaattccaaccagaaatgaaacttaataaagcaacggtgaacaagccacctttagacattggcaccaaaattttccaaatatattcccaatcactcgctccgtcaatcatcgcagctttataaattgtctgtgagattgaaccgaagtagctttgcaagtagtacatgtagaaaattgaagttaaaaatggcaataccaaaccaatataagtgttcaacaagcccattctggcaatggtattgtagttagtaaagataatcgcttcacctggcaccatcaataacgataaaagtaccatttgaacaacgcctttacccttgaacttcaagttaaccatggcaaaagcaccaagcaaggcgttaaacaaacttacaattgtcgttacactagctgtgataaaagtgtttaggaagtaacgagcaaatggagcttgggcgaatactttggcatagtttgaccattcaaaatgcttaggaatgattgttggtggaatagtggttgtttctctaaaactcattaatccacccaaaatcatgtagatgaatggaaagacagtaatgattgcgaaaatcgctaaaataatataagcaatcaaagtaccccaacgaatcttcttcatcctttactgtcctccaatcttcttcatcatcttgcgttgcaagaatgtgacaaacataatgatgataaataagacaaccgttgcggccatcgctacacctggagtaccaacaatttggaacttgttatagatgtagaacactgcagttgtagctgagttaccaacacctgcttgtccattgaataaggcataaacagatgtataaatcttaaatgcagcaatgatattcattgttaataagaaggcgatcgttggcacaagctgcggcattgtaatacgccagaacttttcagtaccagttgcgccatacatatccgcaattgtgtagtaattagggtcaatgtttctcaaagcccccatcaagataacgatgttaaaagctaaagaagtccaaacaccaaagatgataattgtcgtcaatgacatcgctggatcatcaatccagttcggtgttggtaagtgaaccgccttgagcaagaagttaagcaaaccatagtcaccgttaaaaatataacggaatacgataccaatagcgatagttgacgtaacatatggcataaagaaagtcgtttcaaagaatgacttatgctttatcctgctgaaaataaaccaggccaacatgattgaaatagccaaagcaactggcacagaaattagggcatacaaaatagtattcttgattgcccgccaaaattctggatcactaaagatatattgataattgctgaagccgctccaattcagattaattaacgagccgctttgaaaactcattacaaaggcccgcaaaattggataaatactaaagaaagtaacaaagataattgttggcgctaaaaagagccacgcctttttctgattgctcttcattagtagacacgctctccttccttagtaaacaggaatactcgatcaagacgcatcttcaaattgatattattaccaggcttaattggtgtctcaaggttgactaatgaacgagcttgtaccccatcatgggtaaacttcaaaattcgttcacgaccgattaattcgatatcatcaactttagctgaaactgcaccatcttcttcaactggcaaaatattttctggacgaacggataaaacgtactcgccgtcagttaagtcacgtttaaaacgatccttgtctaaatcgtccacgttaatttcaaaatctgagccagtaatcttgccgccattaacctttacattaaagttatcaatcacaggattaccaacaaaattagcaacaaagtagttattgggttcaagatagaagttttgtcctaagtcatcttgttggatcacaccattattaaagagaataatcttatcaccgattgacaaggcttcttcttgatcgtgagtaacaaacaaggtggtaatacccacacttttaactaaagcacgaatttcttcacgaatcttcaaccgtaaacgtgcatccaagttactcaatggttcatccatcagcagaatcttaggttgttgcactaaagcacgagcaatagctacacgctgctgttgaccaccagataaattgcccggcttttgatcagcaagttcggtaatctgggtcgttgccatatatttttcagcaatcttcctcgcctcatccttaggcatcttttgcttgcccacagtcagaggaaacattacattctgaagtacagtcatatgtggatataaggcatagttctggaaaacatagccgatctgacgatccttaggtgctacgttaacaactgacttgccatcaaaaaggatgtcaccgctagttggattaagcaaaccagctagcatatttaagatggttgttttaccacaaccagatgggccaagcaaacatacaaggtcacctttttttacggaaaagctaacatccttgattgcttcatgaccgttatcataaacctttttgaggttctttacttccacgaatttctcatcattcataagtttcacgcaccactatatattgatttaaatttttaaatttctctattaattctaagctaaatatacgaaaataacaaataattttcatttgaaattcggggtttcaacgactttgtgaaatgcttctcagcaagtattcggcttttgttcgcatttacttttatttttcacttatttctttttgaaaattcgggtttactaaatattgtggtaggtaccaaaaaagccatgaattagtcatggctttttgtatcataagttatctccacgttcaaattgatattttgaactattcaaggcttgacgaaccaacttgctcatcaagttcttagtctttttggtaatcacaccagcagtttcatcattagcgctagttaaatatttaataagctctctgccttccatatttttagctttttcatcaataagatcaattcggccaataccgtagctttgacaatcatcacggtaggcgtttacctcataaatatattgatgatagcgtggttcaacaagcacttgtaaagttttatacaaccagtaagcactactatctggatcaaccatatgatctgccaccttatagttaagtggtgtatcctcaatattggtgtagaaaggaacatatggtgaatatgcataaaagcccatattaatccattgaattgcagccatcttggcaggaacatcatttctaatttgcaagatgcttgattcctggtttctgtctaaagcaatagaacggaacatcttttgttctttttctgaaccagatgaaaaagtgtccattggatcgtatggtgtaccgttatagtgactagttaaaaatctttgtacatcttcaacaccaatcttattttcgggaacgcgcgtaaatggcatttcttgactagttgggtcttgttcaatgcttggattaaacaacttctgtccataccaagttcttggagtattgtaaaaagcatcagcttcatccttagtaccaaaaatatctctgaaagaaaagctaccgtcagtactattgtttaaatgattcttttctacgaattctcgaataccagctgaatacataaagttatctggatcatcaaagtcaacattttgaatcaccatgatgttaggacaaattgcgtaagaatcatcaggaacacgagccgcaacccattggtgacccgcgccagtttccagataccaaacttccttgttgtctgaaaaggcaataccgttgctttcaccggtaccatatttttcgattaattgccctaagcgcttaacaccttcacgagcagtcttcacgaatggcaaagtaatataaaccattgagtcttcgttgattccatttgctactaaaggatcatgtcctaagcagcgagcattagtagcttcagtttcagtggctgacatggcaacgttatattcgttaatgccttgctcgtcccagcgaccttctgaatcatcagcagtagggacagcagtccatttgcagccatcgccctcaaggtgcatcttaaagccgttatattttgatacataatcttcatcataatgacgggctgggtttaccacaaaaactttttcgttaatgccaccataaccgtcttcgtcacgcgcaatcatggttgatccatcgattgaagcgtccttaccaactagcattgcagtacagttatcttttttcattattgtttgtacttccttttttatttcagtaataatttttcatattattaattctactactcattaacctgcatttgccgatcaacttttgctcgaccgttattatagttaaaaacataaccgggctgcacgttatagagatagacattgaagtttaaactgccatcagttgaaacggcctgcaaattcacgccgcgggccattaactcattaccacgaaaaacagcagttgcttgataaattacacgcttattctgccgcagtgctctcctaaccttagcctcaaaaatagtctgaatcttttggttagaataagcggattgcgtaaacagattcttaggattattttggtcccctgattgattgcgtggatcataattgccgctttgatcaattccagctgagactgaataggcaatcaagtggccccgattatagatttgggtaccgttacggtgattatagtgccagccagtcggttcaacatattgccttactcgcaagctatcattagccacattgcgcttttccaaaaaggctgtattagagcgcgatgttcgattcaatgaatcaaggttagagtaaatcacccgatttatcttccatgcgcctttgaccaaagtcgacttatcatggttgacttcggtataagcgcgactgccactcttaaaattcaaattagctaatttttgataatcagttggcgatagacctccataattggtcttggcttttgatgcatcgctaattgtattagttacatgttcatcattattgccagtaaagtcacgcaaaaactggctaccatttggatcgctgccagctttagtaaaaactccccataaaatcgcgattaagacaattaatgatgaaacaaccgttccttgtttttttcgtcttcttcgtgtcatctttttcctctaactacgagcccaatcatcaagcatgcttaagaaaaaggtctccgaaaaacgcttaatcttagcaccatttttgatcaaatcacgtgctgcattcaaatcctgattatcttttctaaagaaatcttgatcacccatgattaagtaattagtcgttgctaacactgaattgtcaacttggccgcccatattgttgatcatcttgcccgcttcagcttcgttcatatgaatattgccagacaaaacgatattcttattttgaaccggattgtgccaacctaagtcaacataatccaattcgccagtagttaggtcgatattcttaatcttgctttgtgccttttccaataaatcatcagtaaagcgctgggcaaagtcatcataaaccttgatcgtatcaagagaatcctgcaaaccgtggtgagcctcaacttgagcaattccagcccgctgcatgcagtcaagcagacggttatggcgctcgcgtggataatatgtccgcgccaaacgcaatacgtcaacgtaatcattatcaagcactggtaagccatatttttgacttaaatcatacaaaaagttcaagtcaaaattgacgttatacccaatgataacgtcatcaccaataaactcacgaaattcacgaatagcctgctcagccggaatcccttccttcacaatttgcgcttcagtaattccatttagcttagtaataaaagcaggaacagaattattcttggaaaacttcaccaaattagtatattgatcaacaatttgaccgttacgtaccttaaccccacctaattcagtaattcgatcgcggtaaggatataagcctgttgtttcaatatcaagcattgtataattggtcaaaaagtcaggcttttcctgtccttttttacgcaacttgtcttgcgcaccggttacatgtaaaattccattttttatgtaaatactcattcttcacctatttaattatttaatcaaattcatcagcatctcgtgcgaattgctatcaaaacccattgctcgtttcttaagatcagctggcaaatctgcatcagctaaatcagcggcaatataatgccaattaggaaattgctgcactagctttaccattggatcaagtaattgaggactggtctcatctacgcctaattccaaaattacgacattcttgtcctcggctcccgttagaaaccaacgaaaacgcgtattagcatcggtatcagggaagaagttagcattcagcggcatatgcaattccattggactattgcagtcctcgcactttggtactaaatctgccgttacgttgccgttcttaattgccgtcataaagcgttctactacttcacggttatccttttgaccatgattaatcccgctagaacactgcattttagtccaatcaccaaaggcattgaagattcgattttcattaaagcctgcattttcaaaaaagtgcccgaatgtactggtcgcaataaaatattttttatcacgaattagcttttttagagcaagcatcgtctcactaggctcatattgtaaggaatattcgttgattagctcactcccaaaagcccattgctcgctccaagtatcaaacctcttatctaatgcatccccaattgtatgcacatcatacttatctgcaattttgccaaattgatcatcaaagccttcttcacttaggatatctagtccctcttctttggccatgccattaccagccgttacgatcaccgtgttagcatttttcagccatttttttgctgtcactaaatctgccattttatctctttccctttgaataacctgtcaagcgtaattgtccattaatgtattctcctaagaaaacatcactgatactattataacctgcctcttcaacttgttgctgtaaccaagcttcgcttttgtgaatcaactctaagacatcaatattagcctgaccatcactaattattgggaaacgaatgttagcttcatcattttcaataatagttaattgcccgttttgctcaaagatacaattcttaatcttttcaacagagtagatacctcgactgcgcaatttaaacattaattcattagcggagattcctgctttcatgcagtttcccactaacaccttgccatttttaattacttgaataggtttaccatcgataatccctctaatccaattattgtgatcacggctgaatttcaaaataaaaacaaccaacgtccaaacaattagaactaggaaaaactgaagaattgtaatactaggattgtaaatcaagccaccaataattccacctaaaacataattctgcaactgatctaatgcagtcgtaggagccagattagacttaccaaagacattgatttgaatgattaaagttaagataccgagagcaaacttaatgaataattgtgtgtaatctagctgcattattttattacctctactttatgatcaattacatgggcttgcgttaatgtgtaagtattgcgatcatcattaaggtttaactgataatcaatatttttagaatcaatccttacgatcatgccattagttaaaaccgttgaactaactaaaacatcagaagtcgaaacattttcatctttagcaatcgatttgatgaatggcacgatttgaatcgcctgtgatttttgcgtattaagttgcacatatttttcatattgcgtaccggcaaacaaaagcaaaaataataaggcaataatacccaaatcgcgatacttggttgcaaaacggttatgtaaatatagcaaagcaaaaattatcattgctaacgccgagactgtcaagaagtttgtgtaaataatctctctcgttgattgacttttttatttatcttttaatcaaagtaggattctaaggtgtcctgaacctgaccaaagcctttatgaattcgattgaaataacggtcattgtagctcattgcctgaataccaataaaagcatcaagcgactgttcagttggaaactctgccttaggcttagctttgcgcttgatcacattgttaaatgattcaatcatgttagtcgaataaattgaagctctgatctgcttgggatagttataaaagaccagcagatctggttctatgtctttcaagcttctgataacatggctgtaaaccttgccccatttggtatagaagtcatgcaggacagctgtggcttcttctttgtttgtctgttgatgcacctgtttgaattcgttcatgatcttttcacgatcgtcgacgcgtactttagcgcagatattgcgcatgacatgaaccaaacagcgttgaaaatgagctttaggataagtcctggccaaggctgttttcatgccaacaacaccatcagaaagaaagagttcaacttgcttcaagcctctggacttcatgttttgaagcatctctgtccagacttcaatgttctcactaggagcaatgcagtagtcaatgacttccttatgtccattaggtttaatgccaatggcaatatagactgcttcacgctcaaacgtttctcggcgcaaaggaaggtatgtcgcatccaaatagacgcagaaaaacttgtcgcttagcttgcgtttgtggtaagcctcaacctttggaatcatctgcttggaaatatttgatacctgagctggactgtaatggctgccatacatcttttcaattagatcggctatttccctggtggtcacgcccttggagtaaagcttgataatcatgctttccaagatatccgagtgctgcttgtagtcaggcagcgtgtgctgatgaaattgaccgttgcgatcccgaggcacttgcacttcaattgggccaaattgcgtatcaactttgcggaaataagcaccatttctagagttgccagtattccagccatttctggcatagggatcatagcccagaaaggcagtcaattcagcttctagcaagttattaacagcctgttgtagttctttgcgcaataaatcatttattttgtctggattgaatagagcttgagcaaaatctttggtaaaatcattcatgaaggagttcttctttctgtatgtgttttttgtgttcaaaccaatcatacgagaaaggaactcctttttctaatgtttaaagaaataaatttaaggaatcattcatccttacacaaactattttacagtctcctaacgccgccaccaacatcaaagcatataatactgcctgattagtattctggttattttgaatatatttcattgtataaaaggtcatgctctacctcacccttcatatttttctttcattctaacacagaaaaaaagtagcactttcgtactacttttactagaaattattcacttttcactattattaattatttttgaatttcttttaatccagctttgcgacggcccatgttaaaccatggtgaaacagtgaaggctaacacatcattaattacatagatcaatgaattaattgccatggctaagtttgcatcaccttgagcataagttacgcccaaaagaatcaactggaagacgccactagcagtccaccaaaagtattgattgttgtaacgcataaagcacatgatcccagcagttaatgaaatagcaaaactaatagcatcaatccaaggacgaggatcattggtaaatttaccaatcaaaaagccggatacaacataaacaagtaaagtaccaacaatagcaacaagccattcctttgaaccgaattttcttaagtgattcttagtgtcatcattccatgatctaacagcaataataactggtaaatctaaagttgcaatataagcaatctgttcaaaaatggaaagataattcttagctgaccaacctgcatagataaaacaagcagctgaaatcaaccccaaccaaccattaattgctttagtagcgttaattgccaatacacaaagtgtacccaaaagcgtaccaataaaagtaatcaaagttacgcttgtaattttgccttgaatcagcaaagctaattgaaatccaaacgcaaaaaaccataaacagtaattttgaactggccagcctttcaattgattaaatagccaaacaaaataattttcgtgttttctttccattgtactgagacgtaaaaagtagacaattaaaatattggattaatagaggcttgacttcgatactctttcggggttaagccttttaatctgctctttatcctttcgttgttatagtattcgatatattcctcgattgcttgagttaattcttgaagattatgatacttgtattcttgatcatagaacatttcagttttgagcaggccaaagaagttctccattagcccatcatccatggagttgccctttctggacatgctttgagtaataccatggagttttaaagctcgctgataacgagggctttgatactgacagccctgatcagtatgaaaaatgcagttattaagagctgtttctttggcaaaagccttgtcaagcattgtcattactaaatccatatctggatgtttggagatagtataagaaactatatcgccaccgcagccgtctagaataggcgataagtaaagcttttcattattaagatgaaattcagtgatatcagtataccattttgtgttaggcagggctgcgaagaaatcacgatgaattaaatttggagctattttgccaatagtacctttatagcttgaatatttgcgcttattgcgcctgatgcctttaagacctaatttatgcatccaatagcgaacggttttctccgtaactttccagccctctctgattaactgcaaagctactctgcgatatccatagcggccttgatgatgattaaaaatctcatggattctagcaataagctttgaccgtttaggcttggcgggctgtcgtttgataatcttgtagtatgagcttctggcaattataggtagctcagggtgctctgcaatcgcagctaatacataatttaaactaactttgaattcttgccttagatccgtaatcaccctagctatttcttctgatcttcttggtccaaggcacttagtttttttacgtattcgttcacaatacgcaatcgcaagttttcttctttcagctgctggatctctttctccagttccttgcgagatttctgcttttctttggtcacgggcagggcgtcctttctgtttgataatgacattatacccgtttttcttatattctctaatccaattgttaagcatgccaatacttttaaaccccagttccaaagacagctgtaagtatggtttattgccaaagattgcttgttcaatagttcgctgcttaaactctttggaatagctttggtttttagtagttaaaatttctattccatgcatatcaattaatctaagcatatagtctaaattagctagattcattctgtacgctttagccaattgactgattgagatattttcatctttccatttatgataaatttctattttttgttctttattaaatttagacatagtaaacattctaagctaaatagtgaattagttatccgacgggataattgattcactatttttattcttttgtagaattaaagtagtggtaaaacgatatgccctgaggtctttagacacttgatgtcgcataataaactggcagttttacttaagttttcaatagtctcttcgaagaatgtggacactagatgtcgagtttagaaaattagatctgatttcttaagtaaatacgttttactactaagttttggaggtttttattatgcaagttacttttggaattgatgtaagcaagtctacttctactgtttgtgaactaattggtgaaagcaaaaatgaactaaccattactaataatcgtcctggttttattcaattgcttcatgaattaaccgctttttctaaacatccgcaaattatttttgaagctaccggtgtttattcacgcagactgcaggcttttcttgaagactacggctatgaatatgttgttattaatccgcttaaagccaaaaaagagatgaatatggggctacgctacaacaagaccgataaaactgatgcttatcatttagctttaattcaaagactttatcgccatccggttaatcaaagcgaatcccaaacttataagcagcttaatgctttgagccgcttctatgaccagctgacaagtgacttggtaatagctaaaaatcgacttcaccaagctctacaatcgacttttcctgaaattgaaaatttattttcttctgctagaggtaaaaattactggcaaatagttgtgcgatatcctcattgtgacttagtaagaagagaagataaaaaacagcttattaactggttaatgagcttaaaggggattgcttttaaacacgctctaaggactgcagataaattaattgaattagcttatcaagcttatcaagttgtatcttgctctagcatagaagtcgagcaagtgcagtattatgcacacagattgcttaatttaagtgatcaaagagaaaatttaatcgcaagaatggttaagttagcgaagtctttgcctaatcatgatttagaaaacctagaaagcattccaggctttgcacagaccactgctgtcagagttttagcagagttaggagatttacgcagatttagtaatcctaataaaatcaatgcttttatcggaattgatccaggcagatatcagtcaggagaaatggactctaatttaagtattactaaacatggcaatgcagtcgcacgtaagttgctttatcgagctattggacaaattgataatgcagctaagacaaatccgtgtcatatagcagattattatgaaagcaaaaagctatcctctcaaaccaaagggttcaaaaagatagctattgcttcaattcataaactaatcagaaccatttatgccctgattatcaatgatcaaccatatgattacaacgtagccacacataatcaaaaagactttagtcgtaattaattgatcaagtacattataacgctaagcccaaaaatcagatatggatctgggcttatttgtcgtgtctaactaaaaaaataaatcgacactaaaagatgtttaagttgaaatttaaacaaaaaatgaagccaaacttcttattatgcttgactttacgtagaaaaagacctaaaagtgtctaacttttaggtctcagttcacatcctattcaacatttcccttttttattttaggttgcaaaatacaagatcttgtgccttatccgtgctatgtaaaaaaaacatcgatatctagtatagtggaccattaattaaatacaagaattgacatttttaatttttgcgttaataacatatttctatttccgtttatcaagcaaacatttattaattttttctaaacagcaaaaaaattttgttccttttagtgacacagtgtcatatgatatatacgtgattattaatttatatttttatggaggtacactcatgtttaaaactaagaaaacgcaatttgctatccgaaaattagcacaaggcgcctcagcagttttactttgcttcggcatattgggcggagcaagtgcacctatcgttccagctgcaactacagatgacccaacaaaaacagtcactgaaagtacaattaatagtgagaatacttctttcaatattgaaaccaccaccaatgcatctgataaattcgcttccatcagcaaaaatgggggggtacaacggtagtgccaaattctgctgagccagtttctccggatcagtccattacagaaaatgataatcagcaagaaaaaactactgtagagaattctactgagatatctgagcctgtcaaagacatcaataagtttgataatgatgccaatgttgataaagacgaaacaatcactgtaaaaaagccaacaattaatgtcgacactgaaaaggtagaacaaggcgatgaaacagagaaaagtaaactcgaagaaattaaaaagtatattgaggacgtagccgcaaaacatccattaggcattgccggaattttccacctttttggtaacgaaatagatggatctgctcatattgcaggaaatgtcgcaacagacaaattaagtgctggcaacttcggtactatccaagatgccactagtaacttgactacttgtgatattcattacatcggcagtattgatcatttgaatcagattgatggcgaaaataaactagttatttttggtccagatgttgaatataaatcatacgaaaatggtagttccattcaggtaaaaataaatggaaattggcaaaaagtaggaattccatacaacaaaactatcagagctgaccaaattctagatattcaaggcgaactagataaattaagcgataaatcagacgaatgggctaagcaaacgcaaaccgaaggcgtaattgctgatttcaaggagggtaaatagttggatcgacgtttctaatgctatcaaggatggcagcaaagatcctatttatgtaactattgatgcaaaatacctttcaggcaataacaagcatgaaattgctattaaaggcatccctgcagacgcagaaacaccaatcatcatcctaaatgtaactaatgttcaaaatggcgatttaaccgttagcacaagacttgttttggattattcagaccaaactagcatcaatggcgtaagtgaaaaaccatctcaacttaataagttattatggaattttggaacagatgttaaaaatttaactattgaaggagacttccatttaggtagtattttagctactaacgcacatattaccgctaacaaaaatgttgacggtaatatcattggtaacaaaatcactattaaaggtgaaactcaccgttgggacctaactccgccattagtagaagttgaaactccgccggaggatccaaaagatccacctaaagaccccgaaaagccagagaatccacctaaggatcctgaacctactcctgagcctgaaccggaactaaagcctgagcctactcctgatcctgaagaagagagtactcccccattaccagaagaagtaattcctccaactgataatgaaaattcctctgacttcaaggaagaggacactgctcctctaccagaatctgttgtagaaaaacaagttaaaaagaatcttccatccccttcaactactgaagaaaatattgcacctcatgctgcgactatcccaacctcaactataactgaaaaagaaacagttttacctcaaaccggtgaaagccaagacaagctaatgacgattggactcatcactactagcgttgcttcattgtttgcagtattaggcacagtaatcaaaaaaagaaattaattaaaaatgattcaattcaagccatttttattcttaaaataatctagaattaagtgaggattaaaccatgttaaaaaatagactaaaaatattccaacaaattcttcctactaaggcaactaacactccaaaataccaattgcctatcaactattacgatcctgaaggcagcatggttggcacttattctggaattaacttggcggcaaatgaaactatcactcaccaccagctcaaaagatttatcaacatccatcttcccgaaaactacgaagtttttccttactttgcttatcctaaggagaatatcacctgtgaaaatctgcctgatgaaataatgatcacaatcagattatctaattaaaaaaggcgactcgattgagtcgcttttttcattgcaattgatattaatgttgcgaagcaccagttgtagtatctggttcttcgtgcttttcttctttaacttctgcagccttagttgaagcaccagttgcggcgtctggatcagaatttctacggtaagttgcaccagtagttgcatcatcatctactaccaatttttgaccagtagtctcacagaagtacttaactaatggatataagtctttgacccattcataaataccagcatagttaccttggtcgtcttctacacgcttataatagtccacaaccaacttcttcaaattgcctgttggtattggcatataaacaacatcatgacctgcttccttagtccgcaaagcatgaacaacttttttaacattcggaataacgtcacgaacatctgggtgaactgcgcgcatcgtatcacccacttgatctggcgtagctagcattttcttgttaggatcagttggacggttataccacaagaattggttattatcatcaacaaatgtcattttaccaatggtatttctcagcatccaattaagttggttaacagttaacagacctgcatcaagtttgacataatcgtcaccctccgcagcatgaacttttttagctgctttatctagccaatcaggatcatttttatcgattccctcaactgtatacttagacttaccctttgcatcgaaatcttcttttaagtattcatcggcattcatatctttaagccattttggttcagccatagtaagaccccctcgtatgaactttgttaatctaattatataatgtaagtggtttcaattcaacaattttaatatattttatataatatttttactagctggattatatattattttacgcgtggtgctagttaaatctttctagacaataagccaaattataagctaaaattgcaatttccaaccggctttgaaagcctatcagactacgtgctcgattgttctcggcattgtaataggtcagaagcgaaaagtcgctttcaattgttctgcgaatagccatcaattgatgatcattgtgctttttagctcctgtcatatttttacgatatggtgtccaaagttcataacccatttgttttagctgttgatgcagttctttgcctaaatagccttcgtcgccaagaagatagtaattagatggatgggtattttccagcagttcaactgtctccctggcatcatgaactgatgcttttgttacgacataatcaagaatgtaaccgtcatcgctaacaatgacatgaactttgaaaccatagaagtaaattttcttggtggccttataaccaatgttggcataaccgcgaaaaattttagcacgatagttgcgaattggttggcaaacaggtaccggaaagctgtcaatgatcaagaaatgtccattcaggtcaacctttttattcatttcttgccgtatctgataaatcaattgcaatagctgacgtgaacgccgattaaaacgtgagtgtgataaacaattgaaacattcacagaatcttctttgtgattcaattcctgtcttagcttgccagataagtaaagccaaaatcagactgtccgtagttttaatttgatcaatatttcgccgatgagtaaactcagccggtgcatacaaacgataccagtgccgacaaattatcactaaatctttaaaactaacttgtaaatggtggctaaaacgcttaagcttaaggcagttcaatcagatcagactcttttctattattactatttacaagtcgagtctaacaagattggacttttttattaactaaaacgatttaactagcaccttgcgtattattttatataaaaaaagctgatcaacgagcaactctttacatctttgtctcaattgtatgagtgtccaaatgaatgatcacgtcaaacatcgctttttcttctggtgaaatcttatgagccacctcaataacagcaatacgtggattcttcaacagcgtcttatgaatgcctaacgacaagttcgggtcaagcgcacttgtcgcttcatcagccagcaaaatcggccgatctgataaaagcgcgcgagcaatttctactctttgaatttgtccacccgacaagccactgccgttttcacctacagccttgtctagaccctgttcctttaccaattcatctagaccagcctcatgaataacttctttcaaatgctcgtcactcactttacgtcctaacgtaatgttgaaacgcaacgtatcatcaaacatgaatggcttttggttaacataggaaaaataattatgggcagcatcccaatttcccgttacatccgtaccattgatcaaaattttaccgtctttgggctttctcaaacctaatagcaagcgaagcaaggtggtcttgccccaaccacttggcgccatcaatagaactttttcacccggcttaactgttaagttcacattctcaaagatgcgtttgtgatcactacctgtaacataagataattgttcaacctccataccatcaaaatgatcgatcttctgcttatcatctttcagcacgtgatgcaaagcgcgctgggtcttttcccacattggcacagtcgacttgacttggttaaattcgttaaaaagagtcacgattggcgtgataaagttcaaggccaaatcgaccatcattactaatgtacccacctttaaatttccctgcagcatcataataccgccaatagtacatggtacgatgaagcaaaacaattcagcagctgaataaattaattctagtgcccaagcttgagtcaacgtcatattacgcagagcgttctccattgcctgggccgcaccagctgctcgtgtaacgatgttggtgcgcacgttataaagcttggtagcctgtgccccatttaatgaatcggacacattttgcgtatagttagcgttagtcgttgcccaaatcttggacttacgtgtaatgataggactagtaatcatttgaactaatgctggcgcaagcgtagcaatcaaaaatactagggtcatctgccatgaactataaaaagcaaaagtaattgccccgaaaaacgacaaaccttggaaaatcatatccaattgtgccgttatccgattagtttcaatctgttttaaatcgttggtcatcagtgataaaccgctcttgatatcaggctcaccttgatcaaccaaataacgcaagttagtgcgcttaaaggtcatattcacgtcacgaataatgcccatctttaccgtttcatagacaaagttactggccataaaacacatctgacctaaggcagtcaaagcagccaggcgaatcaaatgcagataatcatgcgatcctgacgaagcaacattcaacataatttgtaccatataagctacaaagacgatgttgcaggccttgattgcggccaaaatggtatagctaataatttggctttttttagcgtacttcaggctcattaatttctccttttctatcccgttagaaacattatacccgctagcttgtctttttctcaattagatacgataattagagtaatcattttaatttttaatgaaaagcagaaaggaacttttaatgaagactggtactaaaattattactttagacaacggttatcacttatggaccaacacccaaggtgaaggcgacattcatcttctagctttgcatggtggtcctggcggcaatcacgaatattgggaagacactgcagaacaattgaaaaagcaaggcttgaacgtgcaagttactatgtacgatcaactcggttcactttattcagatcagcctgactactctgatcctgaaattgccaagaaatatttaacctacgaatatttcttagatgaggttgacgaagtccgtgaaaagttaggacttgataacatttatttaatcggccaaagctggggtggcctattagttcaagaatacgccgttaaatatggtcaacacttgaaaggtgcaattatctcctcaatggttgatgaaatcgatgagtacgttgcttcagttaacagaagacgccaagaggttttaccacaaaccgaaatcgacttcatgcacgaatgcgaaaagaacaacgactatgataatcaacgctatcaagatgacgtacaaattttaaacattaatttcgttgaccgaaagcaaccatctaagctttaccacttaaaagacattggtggaaccgctgtttacaatgctttccaaggcgacaatgaattcgtaattactggtaaattaaaagactggcatttcagagatcaattacacaagatcaaggtgccaaccctattaacctttggtgaaaacgaaactatgccaatttcaactgctaagattatgcaaaagaagatccctaactcacgcttagtaactacacctgacggtggtcaccaccacatggttgacaaccctgacgtatattataagcacttagctgactttattcgtgaagtagaaaatggtacatttaagggcgaaaattaattaacagatattcaggctggaatcgatttccggccttttatttttaaggaaaatgatatggatgaaaaagatgtcaaaattctgctagttgaggatgaagaaagcgtcgctagcttcgtcaaaactgaattagaatttgaggattaccaagttgtttgggctgaagacggcaaaaaagcattagacctttttactcaagaaaagccaactttaattttgcttgattggatgttgccagtatatgatggcatgaccgtgttacggcgaatccgcaagcaaagtgatgtccctattattatgcttaccgccaaaaattctgcctctgatataagctctgctcttgatcagggactagacgactacctcaccaaaccatttgaaatcgaggaattgctggcacgaattcgggtagtcttgcgaagactggaaaaaatgcggcagcaaaatgacgtccctgatacttccctagaatttggcccattaaaaattgatctgcttaagcacgaattttactgtgacaccgagcaaatttatcttactcctaaggaatttgccttaatcactgaactaatgcgggaccccgaaaaagtcaaaagtcgtgacgagttgcttgatacagtctggggatatgactttgttggtcaaaccaatactgttgatgtttatattcgaactattcgcaacaagataggcaatccctacaaaaagatcattaaaaccatgcgcggcttgggctattgtttgagaaaattagatgataatcatgaaaaaagctgatcctcaaacaactacgcaacaattaacccgtttattcgttaggctatttgtcgctattttaattctggtcaatttggcttttctaattatttcatcggcctatatttattaccaagctgaacggcaaagtgaacaagttgttgaagcagtaaaagaaaatcttgattcaaaatatgactggtcggctatgctggatgcttatttggcaaaacaagacgatgatgccatcattttaaccacccctcaaggcaaaagttattactctgaaaatgctcacgagacctttaaacaaattaatcgccaaaatcattatcaaaacatggtctattccaataagcatatttacttcttacggacggaaaactcgcatgactttaaaatcaaggttgcattaaacattgatcgcttatttcatttaattatttggctatttgggacaatgattgtcatcaacttaatcgctattctgctgagcatcccccttattcgccgttttgcccacaaatggagtcgtccaattcaggtaatgaataatgaaattcaagaaatccagcaaggtgcttcaactgagcaaatcacagtgccgcaacaaccattagagattcgaaaattagcccagtcttttaacaatctgctagcttttcaaaaacaggccttacagcgtgagcaacaattcgtcagtgatgcttcacatgaactcaaaacaccaatcgccgcaattcgaggacacgttaatttaatcagacgccatggtcaagccaaaccagaaatcatccctaagtcactggattatatcgatactgaatcaaaaaagatggaaatattagtcaacgatttactcaccttaggaagaatcgaacgcaatactgaagtcgtcaaaattgatttggtaagaattattaatgaagtagtgtcagaaatacagtcagtttatccacaaaaaatacagactgacatgccacaagtattgaaatatcgtattaattcactagattttcacaacattgtgcacaacttagtggaaaatgcggcaaaatattctcctcaagacagcactattgtagttaaattagctaaaaataaaggacaggtctctttcacagttgcagacaacggaatgggcattgcgccagaaaatcgcgagaagatctttcaacgttttttccgtgaagacacgtcccactccaataaagttaaaggatctggcctagggttagcaattgtcaaagctgaagctgataagtatcatggtcaaattaaagttacggataatagtcctcagggaacaatttttacagtttcttttcctacagaaaaatgaagaaatcttcatttaaactctattaaatcttagttttttaaagctgcttagctagtaagataaatatatcaagttaaagcaaaacaaaaaattatcaatagtttaaaggagaacatattatgaagactattaacttaaagaaaattactattactggcgtagcattactcggcttaggaactgctgcaattaccgcaactaatttagctactgaacctaacgtggttcaagctgcttcaagcaaaattaaggtttcacaaaattcagctgttaaaaagtttaaggcaaaattcaaggcagctaaagtcgaatcaatcagcttagataaagaaaaaggccgttacgtttacgagatcgaaggcttcaattcaacgagagaatacgaaatgaaaattaatgccgcaactggcaaagttatctcatcccactccgaaagacttgatcgagacgagcgtaataaaaaagcattaaatttcagcaaaactatttctcgctcaactgctactaaaattgctcaaaaaagagtatctggcaaggcagttgaatggtcattagatcgtgaaggttcaaagaatgtttgggaagttaccatcagcaagaacggccaaaagagcgaagtaaaaattaacgcaattactaaaaaagtaatcagtgttgaacgggactaattgagaaaagaaggtatagaatagatgaaatttactaaactgacaagtattgcattattaagcgcagctttattaacaggaactgtagcatgttcaaaacaagataattcaactgctaaaactactacccaaaagagtgttacttcatcaaaggttacacataattctgaatcagcaatgagcaaacaaactcaaaaagataatattcaaatcaaattaagccagcaagaagccattgataaattccatcaacaatttagtggcaaacagcttaaaagcattgaattaaatcgtgaaggcaaacattacctttatgaaattgaaggattcgattcaaacaatgaatattctgttaacatcaacgcagaaactggtcaaattggacatgttcattcagaaaagttagatcatgatgatcgaaaccaaaaagctctagatttcaagggcaccattagccgcgacgatgctagtcgtatcgcagaagagcacattaaaggcactagcgaagaatggaaactagagcaagacgaagacactggtaaaacatactgggaagttaaggttaaaaatggtcatcaagaaaccgaagttaaaattaacgctcacaccaaagaagttatttcaactgaacatgatgattaataagattaagaacataaagaaagccgcaacattattctcgaagttgcggctttttattttgtctaatttttggataacttttttaccaataaccaatcagtttgaggatcgctaccaacttggaaagtatgctggctcactttttcaaatccatgacgcttataaaaatattgtgccggaatgttcttttcataaacgcctaaccacatgtaatctttgccttcttctcgtgctgtcttttctgcaaaatcaaacaaaacattgcccaacccgcgatgttgaaaattagtacgcagataaattcgttccacttctagagcattatcacgtaactgctcagtctgagcatccccaacattgatttttaaataaccagcaatttttcctttaaccattaaaaagtaaaaacgactattaggattttcaatctctctaatcaacttttccgtctgataatcttcctctaaaaagcgtttcatgtcatctggtgcagtataaggatcaaaagtcgttttaaaagtttcacgtgaaactttctgtaattctttcacatccgctgttgtaattgctttaatctcgtacttcatcaatatttcctctttccaccgttcttaaccaggtgccaattttcactggcattcttttctacaatttgtaacaaagcagctaattctgttctctgtttttgatctagtcctgtcaaaactatttcatttgaataagcattttctttttctattcgagcagctaatttatctcctaattctgtcacaaacaaatgcttaatctttttattctgctggtcattttctttcctaatcagctgattttgttccagttttttaatgctacgagctgccgtcgtccgatcaacattaagcatccctgctagatggtcagaaataattcccggattttctttaatgcgggctaaatacaggtactgacctcgattcaattgcatctctttaaattcaatattagcaatcgaatcaagtgctcgcgcaatagtgccaatttgacgcaaaatatcttctttcatgtttttcacctaaaaactattatatttaattttgttgtaattgcaacaataaaatataaaaactaaaaaagggatcgctccctttagttaattcatcaatttttctttagttcatttagatcgactacctgatcagctaactgcttaacttcatctcttaagtggtgagttaccataattacggttttatctttttgcgtcaaaatcaatctttctaattgtacgctagaagctttgtctaaggcagaagtagcttcatctaacagataaattggtgtatcacgcagcaatgcacgtgcaaaagcaacacgctgtttttgcccaccggacaactgtttaccttggtcagctaaaacagtatccatgccatcaggcaacttagcaattagatcctctaatccacattctttgatcacttcagaaatttttgcttttgaaacttggcgtcccaaagttaaattccaccctagagaagcagtaaaaatatatggatcttgctgcaaatatgtaatctgatcatgcaaatccttatctgaaatctggttatattccacatcagaaatttcaattttcccctgataatctctaagtaagccagaaatcaaattcagcagagtcccccatcagaatatatttatttttcagtttaaaatttaaattcaaattctcaaagataggcttatcttgtccagaatactgataagaaactttatccaattctagattgcttagtttaaaatcagcaggcaaagctccatcaacagttttaagcggtatagtcttaaatttttctataattggtttaactgatttgaattcttgccaattaaaactaatcccacttaattcagcgaaaattgtactggcaaaaaattgtgccccactgatggtcccgactggcgttaattgatgcaaaatcaaccagcctgtttgccctaaaatgataacttgactgataaaggctagaccattggtaatcgcctgagttatcccggctgttttactataatttagcgcatgttttttaacatcatcagaagcgccattgatctttttgacgattgtttgcggtaaattggcaagaaataaggtattgaagccattcaacacatcattaattgaattaaccaaacgttcattggcatgggtatattctaatgaccttttggccaaaattttagaaaacaaattgggaaccactcccataataattgtcaaaataatcacagtgaccacaagactgacattgaagtacgccaaagtgagcataccgaaaacaatttcactgatttgtctaatgatcatcatgaaatcctcgacaccaaagttattaatggttgtaatgtcattggtcagccaagaattgtaagtagctaccgtttgttgatgaaagcctgaataactcgtctgtgatagatcttgcgcaatgtcatttctaattaatttatccacattttgtgccaaacgggtttgctcaacattgactagacagttaacaatcgcgtaaaaaatataggcaccgcccattaaggcaacccacatgaaaaaacgctcagcttttaattttgcaactgcacttaaagcattagcgctagatattccggctagtgtcaaaaagcctgcattaatgactattaaaaatgtaacaaataaaaattcccactttaatcttttaaaatattgcagtaattccattgattctccttatattaaaaataattaaattaataatactatatttatgtatttgttcaatattttttaatactttacttaaattactgcaaaattaaaagagactgtaaaatagtttgtgtaaggatgaatgattccttaaatttatttctttaaacattagaaaaaggagttcctttctcgtatgattggtttgaacaaaaaaacacatacagaaagaagaactccttcatgaatgattttaccaaagattttgctcaagctctattcaatccagacaaaataaatgatttattgcgcaaagagctacaacaggctgttaataacttgttagaagctgaattgactgcctttctgggctatgatccctatgccagaaatggctggaatactggcaactctagaaatggtgcttatttccgcaaagttgatacgcaatttggcccaattgaagtgcaagtgccccgggatcgcaacggtcaatttcatcagcacacgctgcctgactacaagcagcactcggatatcttggaaagcatgattatcaagctttactccaagggcgtgaccaccagggaaatagccgatctaattgaaaagatgtatggcagccattacagtccagctcaggtatcaaatatttccaagcagatgattccaaaggttgaggcttaccacaaacgcaagctaagcgacaagtttttctgcgtctatttggatgcgacataccttcctttgcgccgagaaacatttgagcgtgaagcagtctatattgccattggcatcaagcctaatgggcacaaggaggtcattgactactgcattgcacctagcgagaacattgaagtctggacagatatgcttcaaaacatgaaatcccgaggcttaaagcaagttgagctttttctttctgatggtgttgttggcatgaaaacagccttggccaggacttatcctaaagctcattttcaacgctgtttggttcatgtcatgcgcaatatctgcgctaaagtacgcgtcgacgatcgtgaaaagatcatgaacgaattcaaacaggtgcatcaacagacaaacaaagaagaagccacagctgtcctgcatgacttctataccaaatggggcaaggtttacagccatgttatcagaagcttgaaagacatagaaccagatctgctggtcttttataactatcccaagcagatcagagcttcaatttattcgactaacatgattgaatcatttaacaatgtgatcaagcgcaaagctaagcctaaggcagagtttccaactgaacagtcgcttgatgcttttattggcattcaggcaatgagctacaatgaccgttatttcaatcgaattcataaaggctttggtcaggttcaggacaccttagaatcctactttgattaaataaataattaaaaaatcaatttacgagaaagaactatttacacaaaagatttgacagtttcaattaaaagggatcgctcccttttaattagtctacataagcatatttatatgaccattgcgtaccagcagtattatgaatgatgccgtgaactcgcttgttttgcaagtaagctgtggtctgttgataaatcggtgtaatagcctgattactatttacaatcttagctgccgaaatcagatcattccagcgtatgtcaggattattggcgtcttgattgccagcttttttaaccaaattatcgtactcagaatttgaccacttaccgtaattgtaagacgtacctgtcattggaatttgcataaatgtcatcgggtcgttgaagtcgccaccccaatgagagagataaatgtcaaagttgccttgatgtgctcgactggtggttgacttatcaggaatattggtaatatttatcttgattcccttcaattctttggtccattgtgactgcaaatattgggtcaattgatcactgtctgcttcatcatttgaagataaaacatcaaaagtcaaactcttttggccaatctcctgtaatcccttttgccaatatttcttggctagagctggattataatcaactgtatttttcactgcttgttctttagcaaaatctatacctgttttaggatttgcagccaaatcattggcaacaaagccttttggcagagttgagccattgcctaaaacctttttagtcacaatatcacgatcaattgataatgataaagccaagcgaatatttttattattcaaggcctttctattaactgcatttttatccttaaaattataaagcaagaaacgcactaacgaatatggatattgagtaaagtcattattgctcttcaagtttttaacttgctcacttgaaagtggagttaaatccaatttgccctgttgatacaactgataaccagtattgttagacttaactacttgatagtgaatcttgttcaacttgactaccttcttgtcccagtaatcattattcttaacaaatgaccaggtatcattagttccattccatcctttaatcttgaaaggacctgagtagacttggtactgagccttggttgcgtatctattgccatactttttcacaactttttcgttttgcggcccaaatagtggataagccatcaatactctaaagtaagcgatcgggcgatttaacttaaccactaccgtctttttatccggtgcagaaattcctaatgcattaggtgatttctttcctgcaatgattgcgtcagcattcttcacgccactaaaaagataggcatacggagaagcggtcttaggattcaagcttcttttccaagaataaacaaagtcctgcgctacaatcggatcaccattggaccacttagaatcacgtatcttaaacgtccaggtcttaccatctttagatacggtcccagttttagctaagccggctgttggcttaccatttttaccaagacgataaaaactttcgaatacattgccagtttgaccaaatccggtagacttactgatatcaatagtatctagtggagctgtggtgcttaaatttaaagtgccactttgagctgccgacttactactgctattgccattaccacatgctgcaagaagcattcctaatgaaatagtaacgactcctgctaaaactccctttagtttcgacataaattttcctttctcaaacaaaaaaatgggatgtactccaacacggaatacatcccattaagaaccacaactttttaactagttaatcagtaatagtcttaagatgaatcaccacatcagagcatgtcaaataaatgctgtttgtacaacaacattcagtgtattgacattgcatttgacgcttaaacatgtgattcatcatccttcttacttttgataagaataatcataatttattcgatcacgattgtcaacaaaaatctattgtataattatagaaaaatatttggagaaatttttatggaaattataaaatatggtccttacactcttttcacacttattagaacaatcctaacatttatcgtggctattgagcatatcggtatctgtttcttagaaatgtttggtaaacctgaacaacaagctaaggcttttgacatggatatcaattttgttaaacaagaagctgctcaagtttcactagctaaccaaggcatctacaatggtatgttaggtgtaattttgatcattgctttctttattttccctatccctattctttttaacgtatggaaattaattctaagtttaattgtcgtagtagcaatttacggcggattcactgcaactaagaaaatctttttagtacaaatgctacccgcacttttagcattaatttttcttttcatttaaaaatattgcatttttgtagcaaaaaacataagaaaattcaaagctcctagtgataagctgtcaccttgtgattatgtaatatataatatcagtaaacatatagaacataataacgaggtggaattcatgagaaaattttttatcattatcagcagcattattactgggttacttattgggataattggggcaacgatctatctaaatagtcaatcgtcaaaggtaagtaactttaccattcgaactactaatttaacagctcaaccgaaaatgatcagctattctagcaataacctgccacagattaatctctcacaggattccgccgttcagaaattcaaatcattatatacacatgcagtaggtcaactaccttagactgaagtctagggtttagtggcttgttagcttgcgctaaccagaacaccaacttgcttagatacggatttgacttaccagcagtaatcttttgactattgccgatagaggtcgtctaattaccaaagccttttaagtccgcgagttgctagcggactgcagcttttctaggctgcttcttttattttaggattctgccacttgcctaatcctttttctaagatgttcacggccgcattccaatcacgaatatgatgcatctgacagatttggcaagtccattcccgatccttaagggttaatttcttataaccgttttggcccataatactgccacattgatggcatctttgggtggtgtacttaggatcaattgttagaaattctttgccatatagatctgccttataagccagcatgttcaggaaactacgccaaccaacatcagaaatagcttgagacaaggcatgattcttaagcagttttttgctccttaattcctcggcaactactaaatcgtggtttttgattaatgcagttgagagaacttgtaagaagtcttcacgctgtctgcgaatcttgtcgtgcagtctggcaactgataagcgctgcttttgatagttttttgctagccgcaaattgcgtccttcttttttagcccggcgctgcctgcgagataatactcgttgagcacgagccagcttctttttggctttgcggtaaaagcgtggattagcgaccattgatccatttgaatccgttaagaaattatcaaggttgagatctattccaagttgactctgcgtcttaggcaaggctttaacaaaggcaatatcgctgcctaactgcattgataagtagaattgctcgtcagcggtcttttttatcgtcactgtcccaattctagttgagatatgattaagcaagcgctctttaatcagttttctaaaaccagcaatgcggacaacgcctagcttaggcaatttaatatgcttagcatcaataaacctagctgtcccgttatcaagaaaagcttctggctgcttaggatattgacagttggtctgatatgaccagtcgctgcgttttttatggaaagttgggattccatgaccaatcttacgatagttgttccaagccttctgataattttgaatggcattggcaagagcgaggctatcaatttctttaacacgcaaaaagctataagtatcgcggatattctttggcttagccaatagttcgctattagtgactacttcttctgccaacctagtctcataattattaagaatagaaaaggcaaaaggcattgcttgatattgtctaacagctaagtagcccttagcatgataattacttcgattacgtcctacataagagttgtagacaaagcgctgcgcatcatagtttagcttaatgattttcttttgcttagaactaggataaaagcgaagcttaacgccaaaatgataggctaaactgctcatttttttcatgtgtttcacctcctcgtattatataaattgtaattagtcatattgtgataattaatcaaattagtatttgctttttgatcttcacatgttagcctctaattgtcattggctttggtcaactggtctaggttatcacctcctgcagttttgtctgctttataagtctgccacccagacagttcctttatgctctaactcacatgctgtattgattgcttctttttgctagtccttgagcaattgggattaggtgcagctttcaaagaagcaaccagtgaatacttatactggcgagattgaacttaagaactgtaattaggggttaacatgtgaagatcaaaatctatgatcagaaatttgaaagaaaggaggccatttccaatgaaattatttgtcggtattgatgttagttctaaagatttacaggtcgttgcacttgattcagaagatcaaaacaaacgcttaattaacgatagctttgtcaatgatctttatggtgctagtgaactgaaaaaacaaattttagatctagctcaaaataaacactatgatcaaatcattattggcatggaagctacatctatttacagttttcatcctgcttactttttccaaaatgacgaagatttacaaaagctcaatgtagagactgatgtaattaaccccaaagaaaccagcaggtttcataaagtctttgaagaaagtaaaactgatcctctcgatgcttattacattgctttgtatctaagctttggacattatcgagtaagcattgccagacaagacaactatcttgctttagagcgtttaacgcgtaccagatatgaattagttcaagaactgactcgtaccaaacagcacttcattgaagctttatattatcgggttaataaactaatcactgtcgataaagataagattaatactcctcttttcggtgctacaatgatgtctattgtaaccgatagtaaaactctggatgagatcgcggatatgcctaccgaagacttaatttcttacttacaggttaaaagcagaggacgcttttccgatccagataccttggctaaagcaattaagaaagctgttagaggttcatatcgcttaggcaaagtaatgactgattcaattgatgcagtgctttctgttcattacaacatgattcaaagctttaatgaatctattaaagatctagaaaaagcaattgatcgtatcgttgatgcattaccagaaagcaaaattctggaatcaattcccggtattggcaaaacctatacagctggtattatcgctgagatcggaagtatcgatcgctttgataaagaagaacagctggctaagtatgccggcctaacctggaatcaatatcaatcgggagatcacagcaacgaacatactccaatggccaggactggaaacagatatctaagatattacttgattgaagctgccaatctagcaagattacatgatcctgttttcaaaaaatattaccaaaagaagtatgatgaagctgtctactcgccgcataaacgtgcttgcacattaactgcaagaaaattagtacgagttatctttaaattgctcaaagatgacaaactgtacaggacaccgaggtcttaatttcaaaaattggtctaaatttaaaagtaaacaaaagtttaacattaaaaaaatcaacctttaccaaggcttagtttcatatactcaaatttatgatcaaaaagaacaaatatcatcgcctttcatttgacttattaccacatgactcatagattagatatttatattttacagggaagtcgaacatatgtctctattttttaataaaaaagctgactgctaggtcagcttggtcctatccatccccacattaaaatacggggattttcgggcgtttttcattaaatcgatcacacttagtttaagtaaagatatctatgtttatgacatagtaggctatgatgaccgtaaagactgtactattcaagttgacgcaactaataacaagattctaggtcagtctacgcaggtgcttgattatgactacgaaaaagatgcgtctttgaacctaaaaaagacaatttcacgccaagaagctaatgaaattgccctaaaagaattcagtggaggaacaccgatttcatgggaattaactgatgacaataatcaatcaatttgggaagttaaaatgatccacggtaaacacaaacataccgtaaaaattaatgctagaacaaaggctgtaatctaaaataatccccaacttatgcacaagttgaggattattttcttatcttttatctaggttgactatctgcacgtgacttgtaatcaccgttttcagtaccaataattagcttttcgccattcttgataaaatcaggaacttgcacaactaagccagtttccatagtagcaggtttaccaccaccagctacagttgcacccttaatctctggttgtgtttccttaacggtcatttcaacagttgatggcaattcaataccgataatcttgttatcatctgtaaagtccatatcaaccataatgttaggcatcaagaacttaacgtcatcacccaattgatcagctgaaacttcatattgatcataagtatcagtatccatgaaagtataagtattaccttcgccgtaaaggtattgagcctttttcttagttacttcaactaaatccactttttcagttggacgcatggtcttgtggacaactgcaccactcttaacgtcacgcaaatccatttgcataacggtattacccttacctggcttatggtggttagcctttaaaactttgatcaatttgccatcttggctaaaaatcataccttttttcaaattaattgcttgtaccattatttcttctccctttaatttaaacttacctttcgactagtttaaacacgctggaggcaaagcaaatttttttatcaacagtaaataaatcgtattcataatacctagtataccaaattagatgtgccgcaggtatatccgatcaatcaaatgtccgtcagtcttatgcaaaatcaggctagcacgttccttggttggcgcaatatattcacgcaagttgaccagattaaccatctgccaggtttcttcagccaattgaattgcatcttccagcggtccattagccattttatagtaaaaattatctggcttatttttatttaatttaagtacttttctaaagcgttgcatgtaccatttttcaatcaaatcttcttcagcgtcaatataaattgaaaaatcgaaaaagtcactagtcacaacttgtccactctcgggcaattgcaatgtattaattccttcaataatcaatacatcaggattttttacatgaccatatttcccaggtactatatcgcttaattcttgagaatatagtggataaacgatatccttctttccacttaaaacgtctcgtaaaaaatcactgagcaaagtcatattgtaactttcaggaaagcctttgcgaggcattaaattacgccgctttaatttctcattagggtaaataaaaccatccgtggtcatcaagtgtacctttaattctggataggttctactgagcaacaattgtaataaacgcgcagtggttgatttgccaaccgcaaccgaacccgaaataccgatgataaacggagctggtgaaaaacttttatgcaaaaatttgatttgtgctttttgcgcattctttttttgttggtaaactaagtgtaagtaactgatcaaactggtatagatctcatgcacgtcggttaggtcaatcacgtctcctaaagacttgatatcagctaattcttctttggtaatattgactttatctaagggagctaatttagcccattcatttctgttaaaactcgtataatttctcatatatcgtatccatattccttctaaaacactaacttattataatagaaagcgctaaaaatatgaaaaaaataatcctattcggcgattccatttttaacggatatcgtaatggtcaaaatacaaacctagtaactaatttatttcaacaggcactaattaattatgcacaggtggaaaacatttctaaaagcggtgctaccacagttgaaggcgtcgattatttggagcaaatttccccagaacatgatctagttgttgttgaatacggcaataacgatgccgcaacagcttggggcattagtccagaaagctacgaaaagaacttggctcaaatccttagtgcagtaggcaaagccattgttgtgggattgtgcaatcccaatccagaaagtgacatttttcaatattatggtgctgaaagactcgatctttttaacaatatcgcccaaaaagtcgcaaaggcacatggtgcacaatttgtggatattttacctgcaatgagaaacttaaaagacaaatcgacatattatcaagccgacgggcaacatttaactgatcaaggaaatgagtttttagttaatcaaatcgtgccagtaatcaaaaaagacttagcctaagccaagtccctcttcatcatcacatgttctacgccgccttcatcaaacggttcgcctacaacttgatagcccaagctatcatagaaaggctttacccgcatttgggcgtgacagtaaactgcatcaatcttattttgccgtaaaaatttatgcacagctgtaatcattttcgatcctagctgttgtccgcgcgcttcttttgacacagcaacgcgtcctagcatccatttaccatcttcttgaaacagacgacaagtcgctaaggcagtcgtctgtttttgattgagtaaataaacctgaacagcaattaggtcctcatcatctaaatctggtagagttatcttctgttcagccacaaaagtcgtgttgcgcaatctttctacgcaatagaattctctagctgtcatttcatcaatctttttaaaagtaaaattatctatcttcatattacttgcctaaccaactattgtttctgccaaaccatttttcattaagtttacgcaattgaccatttttttgcaattttgctaaaccttgattgaccttctgacgcaaagttttgtctcccttacgcatccccacagcgaacaagtccattggcacgcgatcattctgaattaccttgtattcgctacttttagccatgtgagcaatataatagtcggcataaacttcatctaacagaattccttgaattcgtcctgcattcagatccaagaacgaattagaaatcgtatcatataaaactgttttcttagcatgcagcacatcttgtttagtttcataccactgctctgctgttgaaccagtttgcattcctaattcataattcttcatttgtttaaatgaactaatgtcactatcttttttcacaactaaaacctggcgattacgtaaatatggcttgctaaaagctacttttttctgtcgttctggcgtaatgctgtaaccattccagagtaagtctatcgtaccgttacgcagctctgtaacgttcattgaccaatcaatcgtttgaaaagaaaccttaatgccatattgtttaaagactgccttagctaagtcgatgtcataacccgtcaattggccgtttttcttttcaaagcccattggtacaaaactatcgtctaagccaattaccacttgctttttgctggcaatcttattccatgtatcttgagtattagcttctttttgtacgctttggcaaccagttaaacataatgttaaggccaagacgatacctaaaatccattttttcattgcctaatcctcgcttaacggtcgaaccttgagcatctgatccgccacattctctgcaaaattcaagtcgtgggtgataatcagctgggttaaacccgatttttttaagcttaaaatcattttctcaacttccttacgtaaatttggatctagcgcgctagttggctcatcataacaaagaatccgcggtttcatagccaaagctctagcgatagctactcgctgtttctgcccacctgataactcataaggatactgctgttcacggccacttatttgtagacgttttaacaatacacgcgcatcctgctctgcttcagttttactcttttttaataccaaagtaggtgccaaagtgatattttgtaaaacgctcaaattaggaaaaagattataatcttggaaaacaacgccaaccttgcctgaatcataaggtttaccgtcaatcaaaatttcaccagaatcttttgtttccaaaccggcaataattcttagtaaggtggttttccccgctcctgatggacctacaattgtcataatttctccgtctttcaaggtaaaagagatgtcacgcaaaattcggtgaccgttaaattctttgctcaaattttttacttctaacatattctcacctcaactacttgtaataagaaaagtatttttccagctttttcaaaacaaaagcacaaatactgatcaacagtagataaattacacctactaaaactaacggtactagcgttacgtctctggccattgccacattgccggccctaagcaaatcacctaaaccaatgacataaactagcgatgaatcctttaccaagttaattacttcatttccaattgaaggcaaaacaatttttattacctggggaataataatcttggtcatcgtttgccagcggctcaagcgcaaaactttcgctgcttcaaactggccttcatcaatcgattggaagccgccacgaaaaatttccgcaaaataagccgcataattcaaaacaaaagcaaacaaggctgcttgatagcggggaaagacgatatgaataattggtaagccataaaagacaaagatcaattgcaataataagggcatgccccgcataatccaaacataaaagttaaccaaccagcgtaatggtttaaacttacttttttcacctaatgagaccaaaattcctaatggcgttgctaaaattaacgtccagaaaaaaatacttaacgtcatgcctgctcctgacaaaagagcgggtaaaatttctgcaatatattttaatgacatactctcaccttcatttttctttcctaataaaaaagccctcttaggattaacctaagaggacgactgctcgtgattccacctcatgttcgcacctgctcacgcagaaatgcctcactaggttgatcattttaaaagaaaaaccctcatagccaaacggctacgagggcgaatgtaatcgcggttccacctcatgtttacaaattgctcacgcaacttgcctcaataagttcaataatcaacctttagctataacgggctatcccggattttcctacttttgttcagaagaccaactcacagatgtgattcatactagcaaatatcttatttccaccagcaaagactctctattactttgactagtattactatttctgttctaagttgtttttaatgttgaataaatcttaaatgatctagcaacttttgtcaattatttttcttcataagtatctggatcaacatcaagcaatggactcttttctccagtataaataatatctagcttatacattgcacgagaggtaatagtataaacaagttgagtttcatccaatttatggtaagcagctttagaggcatcccacatgactaccgcatcaaattctagtcccttagccaagtaagaaggcacaactagagtaccatcaactagtcgctgattagcagtcgcaattaaggtcgtgttttcaccttttttagctaattcttcatgcacaaatttagctgcagctaagtctttggtaataacagctgtcgtacgcttattttgttcattattatgcaaaacgttaactaaaacatcaattgcttcatcatcgttttttctgccccaaattataggcttaggacctttacggttaaaggcttcaatcttttcgccttgacgcaaaatttgcttggtgaaattggtcaattccttagttgaacgatatgatttcgttaattgcaccacatcagttttttcaggatcaaataagccagagatctgcttaagtaagctacgactttcatccttagtaaaaatagcctgattcaagtcacccaacattgtaaacttggcccgtgggaaattatacttcaagtaagctaattgaaatggagtataatcttgaatttcgtcaatgaaggcataacgcatctcaaagtcagtcctgcgaccagtgatcatgtcatacaaatataagtaagctgaaacatcattcatggcaatatggtgctgcttaaagttattcttaacttcttccacatgagccaaccaatcattttcatcaatattccacttagatagatcaaccatcttaggtacagctcgcaaaaagctcaggtattgtgctcgcatattcaaaaagtggttgtgcaaaatacgcttatgcacgcccttcaaggctgataatacaatttttctacctaaaaaggcctcttccttagcctcagactcaaattcttgatcaggtcgatcatataactcatttaattcagattggctcattccttcaatagcgtgtgccacccaagccttcttagtttctggcgtaatctttcgattcaacatcttgatcaattcttcacgcgttgcatcaattcggttggccaacttgtaattttcattgaaagaataatagatctccttaattttttccttatcaaagtaaggtttcttcttatcacggaaataaatattcttaaaaataacaccgcgcttattcaagtgctctgcataacgagtcaacaagttaaagaaattaactgaatccttaaacttagaaatattgctgtctgcggtttgatcttcaaactgtctgaataagttttcaacttccatacctggcaaccgtcgcgcaacaaactgccagtaagtcatttgaaccatattttgttcgcccatttcaggcaaaacattcttaatatagtcattaaacaactggttaggactgaacatgattacatcacttgaagtcaggttgccacgataacgataaagcaaaaaggctatccgctgcaaaatcgcactggttttaccagaacctgccgcaccctggacaaaaagcagatctgctttggtgtttcgaataatcttattttgttcgcgttgaatcgtcgttacgattgacttcatctgcgttgatgatttttctgacaaaacttccaagagcatttgatcaccgattgactcatcagtgtcaaacatgttcacaatcttgccatcttcaatcataaattggcgtttcttagtcatatcaactgtaatttcaccttcaggcgaattgtaagaaactttacccaatttaccatcataataaattgaagatattggtgcccgccagtcatagatcaagaagtgatcgtccttgtctgcaaaagaacctagaccaatataaatcgtctctgttaggtcctcatttttttctttaaaatcaacccgagcaaaatatggtcgcttctctaaacgctctacagtctctagctgcttagctgaatgttgccaagcatgttcacgttcactcaataattgttgctgctggtggattgacagtgctgtttccattgaagtggaataaccatcataatccaatttaacatcgtcaaaaaagtgtgaattaagctctcttgcttcgccttcagctgatttgatagatttttttaaagttttttcgcggtccttgatctgacccataatattatcaaggtgcttttgttcaagttctttttcgtttttttcagttttggctgtagccatctaatcaccttttctttaaaaattcgcatactattttaccatgaatagcgctttcataatagttttcctgctcgtgagaaaaatataaataaaaattgatgaaaactttaactttagagactataatcttgacatattggggtgatatatacatgaaaagattttttaaattactgagaaatgttctcttgcttgctcttatcgctcttggcgtttggacttatcagaacaatcccaatattcgtatcgcaacgcaagactccctagctacacttagctatcgaattaacgaacttctaactaacgaaacgaccatttctcccaataacgaaaaaaagactactaatatcaaaactgacacagataaaacagaaaatgacaattcttcagacaatcgtgtatggtcaaatcctgaagctaaggtttatatcgatattagcaataatgctcaactaagatcagctgcagtcaatgcaatgaacgcttggaatcgtaccggtgctttcacttttcaccaaataaatgataaaaaagacgctcaaatcgtcattaatacagtcgataatagctacaccaatgccgcaggagaaacagcaactacctataaccctgctacgggacatttgttaaaggccacggtcaacttgaaccgttactatttgcaaaacgaatggtatggttacagttacaatcgaatcgttaatactgctgaacacgaattaggccacgcaattggcttaaaccacactaataatgtctcagtcatgtacccaaagggttcgatctatacgattcaaccgcaagatattaaaactgttaaaaagatctaccacgaaaataattaactttaaaagctcacctcttttttctacaataaaaggtgagctttttacgaggagaaaaatatgaaaagaatttatatcgtccgtcacggtcaaacttatatcaatcgctacaataagatgcaaggttggtgtgacacaccattaactacaccaggaattgaaggcgctgaagaagctggtaaagctttaagcgaagtaccttttgacattgcattgtctagtgatcttaagagagcaagtgatacctgtgagatcatcatgaaatataacgccaacaaagacgaattgcagcacatcgctagtccatttttcagagaacaattctacggctacttcgaaggaatggattccgaaatggcttggcgaatgattggtggcagtcacggctacggaacacggcaagaaatgtttgctcatgagagcatcgatactattaaggattggattaaagaagccgatccttatcaccaagcagaaaacgctgaagaatattgggctcgtcttgatgatggttttaaattaatcagtcaattggatggcgctgaaaacattctgctagttactcacggcttcactattagaagtctctggtatcgttatggtgaccatattcctttggttccaggtcctaagaatgcttcaatcactattatgacaatgagtgaaaaaggcgaaattaagatacctaagtggaatttaatgcatttatagcaaaataagattaggcgaatcgggcctaatcttattttgtttaattatttttgcaaaacaatatttttatatagcttcactgttattaaaaaacttcctactatttttaacagtaggaagtcttactctaactaatctttagtcacttgttttagtttttattaacttgcagtcgcccaaagtctgaatcaattgtttgccatctttttggtggaaaacagcgttttgatacgacaatcgttctttctttttactcttatctttatactttttaataaaggttacttcatagttaatccgactataattacgcttacctggtaaaacagagagcaccttgatctttacacttaatttcttgatactcttctttttatgccattcctttagttgcttagcaatcttcttatagtctgcattttcttttccattttcaaagtcatctgcatttggcgacttaagggtgttgtacaatagcttagctgcatcccccaccttaatcaagccaggccaaatcgggttaacaatatagtcaccttctgcatcctgatagacatctttttcgccattgccttgatattcagcagtaccatcataatcagtgacgtcatcctcactattagaaaattctgaactaatcgattgcgacaaatccgttaccctttcggacttaatagtttgaccatctgccttactcttaatatagatttccattcgcttagcaatcggataatccttgaaagtatagctaccatgctggttcaatttacccgccttacgatcattgatatagatcgtaccattaggaacgctgcgcacttggaaagtggccgttttgatcttcatatcaacagtcttatctgaccaaatgttaacaatcgaatcagcatctaaatggcgaccattaaccttagatttaactaatatatgatagcgaccaggaaagaccatacctaaatcttgatagtaattctgattgccaccttccatttcaccataatccttttggttaaccgtcaaagttgaattagcgtgattggtcttcacctgtgggcgatatacttgtatccacaacttatattttggaaaaagcaaaaaattgcgtccatcttgaatcagtctgatttcaccatgatcgcgattatgacgcaaattataggctaaacgtttagctgcactgtgatgctctttaaagtaattttgaagcggcttcagcgatttatctgtcacatccatatcaggcgttgaagccgtgacatactgagccagctcagttttaggatcctgcattttagctacaatgcggtcaatttgacgttctttagtgtaataaaaattgccaattagccatgcaataccaattaacaggataataactcccgatatccaaattttcttatgttttttcattgatcaaaacaccttttcacaaatccttttaacttagattaacaagttgatcaaaaaaagcaaacatcttttgttcacaaatcaagacgaagttcttattatatttagtagcattattttattttggaggggattgcacagtggaagtaaattttgattttgtaaaaaatagcagcttcaaggaagcctttcctaccgctgaaaaaatccacaaattatacacaattgatgattatcgtgacgttatttcaaattcacgtcttctattagagagtctaatcaaaaaaatttttaagttagaaaatctcagtccatattacacagttcatgatggcgaacaccgtaatttgcgtaataatacacattatttacgcaatgaactagattaccctctttcgatcatggatttatttgacgaaatacgccacattggcaacgctgctgtccacgataaccaaattgaaccagatcaaaagcaagcctggcactgtatttgtgatttacacgatattcttgtctttttaattaacagctatgacggtcaagacctatattatttgcgtcccgatattgcgatggaagcacaaactgatgaagaccattattatgtgcgccaaaataagcaaccaaaaataatgaaattgcatgatcatcaaaatactaagaaaaaacagtccgcatctgcaccaaaaaaggcgaaacatgttaaacatttttccagtaaacagcatatagagcaaactaactctgcgtcacaaacgaaaactactccttctactaaagacaattggttaagaaaaattaaagaactctttcaccatgattagttatattgacactatgtcacaatatgataaactatatattatataatttacataccgagaagcgcctatgacgctgccgatacgcaaatgaaaactgaacaagtttctcaaatggggaacggcttatgctagtaggtcgttttccattatttttttacgaaaggagtggttagtccgctatggataatcacaggcaaaaaccttgggctgtcgaacagtctgaggtattaacaaatacaaaaacaaccgaaactggtttaactgaagacgaagttcgaatacgccagcaagctggtttaaacgagctcgcagctaaacctcctaaaacagtaatccaaatggtcaaagagcagatttttgatccaatgatcggtatcttattagtagctgccctcttatctgctatgtttggcgaatataccgaagccattattatcgcgacaatcgtggttcttaataccattattggagtagttcaggaaaaaaaggcacagtcttctttagctgcgttacgtgacatatctgcgccaactgcccatgtaattcgtaatggcaaagaattaatcataccggccaaggaattagtagttggtgatattgttaccttgcatgatggggacatggttccagccgatttgcgcttaattgaaacagctaacttgaaaattcaagaagcatcccttactggtgaatcagtaccggtagaaaaagacgcagctgctgttttaaatccagattgtgctcttggtgaccgcatcaatatggctttttcttcctcaattgtgacttatggtcgtggtcaaggcgtcgtgacagcaattgggatgcaaacagaaatgggtgccattgctggcatgttagaagatccaactgaagtacaaacaccattgaaacgcaaattagctaaagctggcatggtcttaacgactatcggcttaattatttgtagtttggtctttgcaattggtgctttctatggccgtccacttttaccacaattcttggttgctatctcattggcaatttcaattattccagaaggtctgccagcaaccgcaacaattgttatggccttaggcgttaaacgcatggttaagcgtaacgctttgatcaaaaagctgccagcagtcgaaaccttaggtaacgccactgtcatctgttccgacaaaactggtactttaaccttaaacaaaatgactgttacacaggcagcaacaaatgacttcagccaaagtcacatagttgaccagcttgcagcaaataaaaccaatcaaactttggcctatgctagcgctctttgtaacgatgccagcttgaacggtgaaaaagaaattggtgatccaactgaggtagccttaattctttttgcccaaaagcttggctttaaccaatctaacttaaagaaagaattcccccgtttgttcgaacaaccctttgattcggacagaaaacggatgacaacattgcacaaaattgacggtcaattaacggtcttcactaagggtgcaacggacgaaatgttgccgttatgtacacacattatgactaacaatggcgtgcgtaaaattacaccccaagacaaaaagcaaattgcccacttgtctcaccaaatgcaagctggcgctttacgagtactaggctttgctaccaaaatagtggataacttacctgaagcaaatgctgatttggaaaataatttgacttttatcgggattgtcggcatgattgactcaccacgaaaagaagttgcagcatcagttaaaacctgccgtgaagccggtattcgcacaattatgattaccggtgatcacaaggtaactgccttggcaattgcgaaaaagttaaacatttatcagccaggtgacttagcaatctcgggaactgaattagaccaaatgtctgatgcagaattagatcaagctgttgaaaaggctaccgtttttgctcgcgtttctcctgctgacaaactgcgcatcattcaaagcttaaagcgaaatggtgaagtaacagctatgaccggtgacggagtaaacgattcacctgccttaaaggctgccgatatcggtgtcgctatgggtgtaacgggtacagacgtggctgatatgattttgcttgatgatagttttaccacaattgcgcacgctatcaaggaaggtcgccgcgtttaccgcaatatccaaaaagtaattcagttcttgctagtcggcaacattgctgaaattaccactttgtttgcggcaactatttttaactgggatgcgccattattggcagtacacatcttgtgggttaacttagctacagctactctacctgcccttgctcttggcgtagacccagcaagtaaaaacattatgaaacacaagccagttaaagctggtactttattcgaaaaagacctagttattcgggttattacccaaggaatatttgttgccctgcttactttaactggttacttcattggtaaagaaatcggcaatcaagttgtcgggcaaaccatggccttcagtattttagcattggcccaaatgattcgttcatttaatcagcattcaaatactgatcccatctggaaaagatcagctggcaataatccatggttaacagtgtcattcattatctctgcatttttcatgggtattattctctttgtcccagcaatgcaagatgcatttcacattaccagtttgtcagctggacaatggttaatcgtaattgccctagctttactttcaattgcacaagttgagttagtaaaaggttgggcaaagtttagaaatatttttattaatgacaataatttaattgaagattaattagttacaaaaagacggtagcattacaacgctatcgtcttttttgatattaaactttggctgctgccaattggtcaacatctatctgactacgaccaatctgaattgccttttcggtactttcattcaagctagcattgatcatcttatgactaagctccagcaccattggcaaattaacaccgctaactacccgtattcgctcaggatacatatcttcatattccgaagcgactaagtggggtgtcccattttttaaatcagttagcaccaaaatctgactattttgatatttattcatgactttagcaaaacgagccttaaaatctctgattcctgtgtcgtttaattcaattgtcaggatctgatcattcttgcctaccaacatatcatgtgcagacattagccccgcagccaacccttcatgagttgcaattaaaagttccataaaacgcacctctttgtaagcgatttctatagaaccattttaacatatttttgtattaattaagctgttcaatatctgctaataagctactttgttcaggtgttagccgctcatccttttgccgtaacttaagtacttgtagacaagtgtgcaaaatcttttttccttgttccgtcacttgtttgccatccatatcaggcgttacactggctaaaaagtcatccatctcatcagcagtaaccttgaaaacatcattttctccatgaatcaagggcatccgattgagcatttcttcaatcatttgtaatttatttctagcttcttcaaaatctatcttgttcacatccaattctttttcttttattatacaaaaaaacagccacctaagtgactgtcatctttatttcgtattaataattgcgtttgaaattgtagttgcattagattcgatcagttgatgtgaattattaataaaaagggaagccccaattcctatagcagcaaatacaagccaaactttctgtaaaactgtactcttcatgttcccagctccttatatttcttattacttaaacttcccacacgcagaatcgctccttttattgtgattctgcgttttttaacaaatataaaaggcacatgaccttttcattgctataattaaagtgaccaaacgataattctatgcatgaaaggcttgtgccaatgtctattttaccatctcctgaccaaaaaaatgaacaactattttcaaactcaatcatcagcttcatcaagaagtttcaggtgatcaagctgttgagaaaatgtggcttccgcaaggaaaaaggcattagcctgttcagcttgtttctttacgttttaagcaatgtctttcgtgaccgcagcttatatatgcagctgaaaacggatcattttaaagaaagcttttctaaaaattcttattaccgatttatgcgcaacgtccacgtcaattggctccacttcaccacactgctttctgcgcaaatcattaataatcacttgcgatctttgacttcagaaaaacgggctgattgctttgttgtcgatgattcctacttctctaggaccggcttcaagaaaacagaattagtcgccaaagtttttgaccatgtatcaatgacttacaagaaaggttttcgcatgatgaccctgggctggactgatggagcttctttcatgccaatcaattcggtgttgctgtcctctcacaagctacagaatatgattggcgaaaacaaagtctgtgatcagcgcaccattgctggccaaagacgcatgcttgcccggactaaaggcacagacgtgatggttaatttaatcgaccaagctatgaaagcaggtcatcaagccaagtacgtgctgtttgacagctggttctcaaatccacatcaaatcgtccagctcaagcaaaggaagctggatgtaattgccatggttaaagttagctccaaaatcaaatatgaatttgaaggagaacgcaaaaacatcaaacagatttatcgtagctgtaaaaagcgacgcgggcgttcgcgctatctgttgtcaattccagtcaaggttggccgccaagacaaagacggtgctaaaattgacgctcggataatttgcgttagaaaccgtgccaatcgtaaagagtggctggctattatttgtaccgacatgtcgcttagcgaagatgaagtcattcgcaattatggcaaacgctgggatattgaagtttttttcaaaacctgcaaaagctacctaaaactaagcacggaatatcatggtctgtcctacgatgccttgactgctcatgtggctatagtctttacccgctatatgctcatgtcagtagccaagcgggacgacgaagatgagcgaaccttaggtgagcttttctattgcatgattgatgagctggcggatattacattcagtcattcacttcagctaatcacaaaagcaatggtggctagcgttgaaaaagtctttcatgccagtgaagcacaaatagcagaattcacggctgactttatcaatcgtttacccaaatacatgcaaaaattgttaaagaaaactagcaaaaatagtatagaagcccaaagctaagcaatatcaaagaattgccagcttatttgatgtgggaagtttaagttattatataaaaagccgatcgttatggggatggctacgcttacaattaacataattgtaatattatttacctttacttaagagttacttctccagcaacatttgtatcaaaaaagtcagcaatttgatggacgtccatcccttgccctaaagcccacattaatttggtaatcgcactctcagaagtcatatcacaagcagaaatagctccttccagtaaagcctcacgccccacctcatatttggtcaaatcgctacgttcatacaagcattgactgctggctacaacgggaataccttgacgaattagcttaccaattgcggctaccatgttgcggcgaataaagttcatcccgcctagaccatatgcttcaataacaattccacggcaaccactattaaccatcgcaaaaagcagattaggatcaaagcctggaaatagtttcaccaacgatacgtgtgaattaattttggtattcaaggttggctgaccgtcatgttctctttgaaaatgttctgaattaaaaactaatccatcggaagaaacggttgctactggtggcacattcacactttcaaaagcatcaaagttggtagtccgcacctttacactgcggcagcccagcataactttattatgaaaggctaaataaacatcaggtggacaagttgctgcagctgcaaaagccaaccgtaggttatcgtgagcgtcacttaggaccacgttaattggtacctgacttcccgtcagcacaaccgggatattaatatttttcagcataaacgacaacattgatgccgtataagccatagtatcagtaccgtgtgaaacaacaattccatcgtaatcattgcggtatttgtagatattttctgcaataaatttccattcttctggttggatattagaagaatctaattgcaaaatatcgcggacttgaatgtcgtacggcaactttcccaacattttaattaactcttcaccggtttccttgggtactaggcctgcatcagaagcaacggaagcaatagttcccccagttgatagcaataatattttcttcatcttgttcccctttatctcaaatcacaatgtcgaccataactattcatgattagatcaattaaaacataggccgaactaaaagttaccgcattttgcttactaaattgaaatggcgtagttttgaagaaaaagctatagtcgctaagagaggctaattttcccgtttgccagctagtcagtgacaccaatttcagttcagtattcacgacatcaatcttcttaagttcttcaataattgttttattaaaaccaccaaatgaaataacaaacagcatgtcattttcccgtgcagaccgccctaataatgccacttcgtcgcgtgcactaggcaaaataattgcttttttaccaattaagaaaaagttatgcgccaaatattccgcgataatttgctgctgccagccagtagagtaaagatagatcgtttccgcttgatctaaatccgcaaaaaatggttgtaagtttaatcccttaaaatatttaaaagtttcagcaatgatcttttgtaaatccgtattgaaatctagcgtttgcttgttcttaacgttttgctcctttcgtgtagctaactcggacaattcaaatttcaattcgctgaaaccacttaatcccaattttttgcttaggcgaaaaatagcggacttagaaacgtataatttctgagctaattccagcaaactcaactgacttgctacttcaggatatttcaataaatagctaacgatcgctttatcggtctcattaaaactttcctttttcttcatgaccgctgtttctaaatccattctgtttcctttctcatcactgtttcttattaagaaaagaatatcatgtcgtactcaaaaaaggtagccaccctatttgagtaactaccttaatttttattcttgaattgaagttatgttatgacaattaattatttaagttctggccagtatggagcattaactggaatcatgtcatccaaaatcttcttagcaacggaagcatctggtacagtcttgtttaatgcaaatgcttgcagcatcttattgtatgaatgttcaacataagcatcaacaaccaatttttcacaagtttgttgttccatcatcaagcctctttggaagcgacctgctttacccgtagccattggttgaatgccatcagcaccaaacaatgctggtacttcaacaattgaatctggatccatattagaaattgcaccgttattagcacagttagctaagaacttttcatgagtgttaaatgcgatcgcatgacaaatatctacgatatattcagagtgcaaacctgaaatatcccaaatattattcttagcagttcccacctttacgattctttcacattcgccaaagacaatcttttgccggtgttcacgaatttcatcagtacgagtatgcttcggatcagcattagcaacttcatattgtgggaagtagtagtattgcatgtaattgtttggcaaagtttctggctctagcttatattcatcggcaactttcttaaaggtggcttcccaagaagcttcagtatccttgtcgtaatcgccacctacccaatagccgtgctctttgacatattccttcaacttaggcattaagtcttcgccagtcttcttgttgcgaacttctttccaccagccaaaatgattcaaaccataatagttaaagtcaatatcatgccaactgtccaaaccacaaatggcagccattctgtccatatcatcaatcggcatatcacaaatgttaattaccttagcatttggacgaagacgacggcaagcttctgcaacgattgcaattgtgttggagtagttgatcatccaagcatttggtgagtattcttccatccaatcaataatttgcaaaattgcgggaattgagcgaagaccataggccattcctccgggtccagtagtttcttgaccattcacgccatattttaatggaatcttttcatccaagcttctcatgtgatatttaccaacacgaattgatcccataacaaaatctacatcagtaaaggcctctttaggatcagttgtgtaagaaaacttaatttgaggtgctctttccttcatgataatttcaacagctttggcaatcttttcttgccgttcagcatcgttatcatagaacttcaactgtcttaatgggaatttatcctgactcttgattaaatcaaggacaaatcctggagtaaaagtactaccaccgccagcaataactactgaatatttcttaccatccataatctattttctcctttaaataaaactaagtttttatctctgtttcatttgccttacgcatatatttatatcatcttctcccacaaatgtattcgttttcaccagcttcagactttgtttcaagttttggaacgcgtttcactacgcgaaatatttttaaattttgccttaagcctaacaaatcaggtgtttaacttgcctttattagtaatagtgtaaaaatgaaaaaaataatcgtttcatgaccaagataaactataatttgaacattcctttaaccacaaaaataaatagtccgtatttgatgatcgtatagttttaattacaaaatacgactcaaactagtttcacttccatattttgtagtgtaattttgaaattaattataattttaatatctttctgctattttctatacaatataatatttttaaaacatatctttgctaaacgctgattttatcccaactcttagtcattagtacttgataatttacagataacttaggttataattatatatttttttatataaatttagcctttatcaaaaaactttcgaattatttattaaccgtatagtttttattttaggtcgccctaagtcttgataaactagtactctaaaaaaataacatccatgttttttatttaacacgatacgttattaaagcttttcatgtatagactttgtttttaataatgttagtatcattccatgaagagacatataacgagctttaaggaattgactactccttaagcaaaaaaatgacttataaattggaaatccttttcgtaatataaggggattaagaaaaatgacaaagaatgttaagctattatcacttatcggtatcgcagccgctttagcaggtggaagtgttgctatttcaaataataacaactctactgttcaagctgcttctatcacattacctgctggttacaccaagagtgccattattaaatggaaccaaactggtaaagcaagtaaggctttgattgatgcttctaaaaaaggcatgaaggaaaacaccaatagtgatgcgggttcagataatacgttagttaacgtgactaaattaactgcgtctcaacaaaaagaactgagccaatacactttaagcttaattaattctgcacgtcatcaacttggcaagcaaggctggacttacaaacgaggtgctttgcactttgcaaatcgtgtagctaacgaatactacagccataacagatcttgctgggatgccgaccactatgttactggaattgaacgcgcagctaaggcttctggccttaactcaaaagtaggtcaagtctacgaagatgaagctggcttacctatctcttcaacatacaatactaacttacgtccaatgtcagtattgaaaaaccaaatttactttaacgtaaagcaaatgctttttggcggttttgcaggctctgacagtcagatgaatgactcatctagatacactgaatgggaacacgctggtgatttacttggttgccgtactaagagctacgatgctaagactaaatactttggtattagtttcagtggcttaaagggtgaccaaagcaaggttagtgttcacatgatgggtgttgctaaatgttacatccaaaactacagaaaattcaatcattaaaactaacgctgtagttaaaaacttaatacagtttcctaatccaagagctcaagtagttcagtcaactatttgagctcttttatttttgcccatttttcatcaaaatcctgtcaaaaaaatgcagatattcacacattttcaattaagctatctaattgtttgtatacattagctaatactaatagtgtgttaagttattatcttattactattttgtctataatccttgataaatcaatgtttccgaaactgtcaaatcttttgtgtaaatagttctttctcgtaaattgattttttaattatttatttaatcaaagtaggattctaaggtgtcctgaacctgaccaaagcctttatgaattcgattgaaataacggtcattgtagctcattgcctgaatgccaataaaagcatcaagcgactgttcagttggaaactctgccttaggcttagctttgcgcttgatcacattgttaaatgattcaatcatgttagtcgaataaattgaagctctgatctgcttgggatagttataaaagaccagcagatctggttctatgtctttcaagcttctgataacatggctgtaaaccttgccccatttggtatagaagtcatgcaggacagctgtggcttcttctttgtttgtctgttgatgcacctgtttgaattcgttcatgatcttttcacgatcgtcgacgcgtactttagcgcagatattgcgcatgacatgaaccaaacagcgttgaaaatgagctttaggataagtcctggccaaggctgttttcatgccaacaacaccatcagaaagaaaaagctcaacttgctttaagcctcgggatttcatgttttgaagcatatctgtccagacttcaatgttctcgctaggtgcaatgcagtagtcaatgacctccttgtgcccattaggcttgatgccaatggcaatatagactgcttcacgctcaaatgtttctcggcgcaaaggaaggtatgtcgcatccaaatagacgcagaaaaacttgtcgcttagcttgcgtttgtggtaagcctcaacctttggaatcatctgcttggaaatatttgatacctgagctggactgtaatggctgccatacatcttttcaattagatcggctatttccctggtggtcacgagtaaagcttgataatcatgctttccaagatatccgagtgctgcttgtagccaggcagcgtgtgctgatgaaattgaccgttgcgatcccgaggcacttgcacttcaattgggccaaattgcgtatcaactttgcggaaataagcaccatttctagagttgccagtattccagccatttctggcatagggatcatagcccagaaaggcggtcaattcagcttctaacaagttattaacagcctgttgtagctctttgcgcaataaatcatttattttgtctggattgaatagagcttgagcaaaatctttggtaaaatcattcatgaaggagttcttctttctgtatgtgtttttttgttcaaaccaatcatacgagaaaggaactcctttttctaatgtttaaagaaataaatttaaggaatcattcatccttacacaaactattttacagtctcatgtttccagcaataactgtacataattaacaacagtacagcaaattatgattacaattaataaactttttcaaaagcatttttacgttatccatgcgggattttcgcttacacaatctattacattattgttatctaaaaaaaggattgctatattaaatagtaactggtatattctatatcaatatgttcaatgaacataaaaaagggaggataaagatgtatttcactactacaagaagaaaaactaggaaagacaggatacatatccaattctttgcacaagtcttaaaaaaagacctatcacaaggaactgtttacaagtattcagttcaaagattctgtgaagctgcaaatatctgtcgcggaactttttaccgcaactttaaaaatttgaatgatctatttagtcaagtactgcaattcgaaatcaattcttgcttcaacaatccccaatcaagtactttacataaaaaagcacacaacttactgatagaaattgaaactaatgccacctactatcgaaatgtacattctcttgcctcaagtcaaattcgaacacaagttgaccaagctctttttcgtgaaatgcaaaaattgctattcaatagtaatctttctaataagcatatccaaagcatttccagtttgattcttattcgaattctagactggattgctcatgactatcaggacaatgtcatcacagtttatactgacgttgaatgcctttttctccatcacattaaaaaaagttgctagcaacgaatactagcaactttttacattaagcataaattttacgttttaaaataccgacataaggtaaattacgatataagccgttatagtcaagaccataccctactaaaaatgcatctggagcttgaaaaccatagtaatcagcatggaagtcaactactctagttgtcggcttatcgagcatcgctactacttcaacactagcagcaccgcggtccttcatcacttcacttaaagcttgaagcgtacgacctgtatcaataatatcttccataaaaattaccggttgatctttaacatcagattttatatcttgagtgatctttaccttgcctgttgattcggtaccggcataacttgaagccttaattggatcaactgtcaatttaaagttaagtcgcttgatcatgtcactagcaaaaatcattgccccatttaaaacgggaatgacaatcggctgcttgccctcatatttttgattcaattcagcagccatctcatccatgcgcttatctaattgtgcttgatcaaacaaaattttctcaatgtcgttattcattatctgtctaccctttgaattcataattttaccaatgatccgattctagcatgattttgaattgatttaaagctttttagtgcttaaattgcataatttgttcatttattgtctatatggactataaattgttcgggtttagtggaagatagtgttttagtaattgaatatcacttttttggataaacataaaaacagcattctttcagccaatgctttaggaatactgcttttatcttaaatcttcttaatcatatggtcataagtacgatcgccaatcgtcatcgatttttcaatttcataacccttatgcttgtataaagcttgcgcacgtggattttctttgtccacatttaagctgataatatgatagccatgagctaacgctacttgttctgcctcgtccatcagacgactagcaatgtgttcaccccaatggtcgggatgtacagctaacgcatcaatataccactcgtgtggccaagcttcttgatcatcaaaaatcacggttgaaatgagtaaaccagcatttgcatagttatggcgcaagacaacatcgataatcttctggtccttataaggatacatatctaaaattccggtcaccttaccatgatcttcagctacccaaattcggcggtatgaatagcgataatcctcggaaatgaaccctaatttcattaagctatagaattgatcttctggcaaagattcaatcgacttcatctgcatttcatcaaaaatttgctttaagatgggatatacaaaaggaaaatctgtttttcttgctcttctaatcatttttctccctcaaaaattactcatcgtcatgatcattatcaaacaaatcaacatcatcaactacgtcaaacttaattggatgttctggctgatgcttcaacatgtcaagcaaggtagttgccttaggttccaataatttgctgtcatgcattaaacgatacagtgcaaagacctgtgcatatgtagcccgaatcagcaaaccatcaacctgataagcggcatcattatcgtctactaccattgatgtagtcaaaaagtcgcgcatctttctctctgcataatcgtcacccatcatttcctttagtgctggatccatgtcggcgtatgtatgtgacagcttagtaactcgttcaaaattgtaagccaaatcaacattaatccgttcaagactgtcctggtctaactggccttgattcttgcggatttcattagctaaatcatcgattgcttcaccaaatgcaccaaaaacataatcaagtgtcaactgggtctccaactgctctggttccatatcgactaattgtgctgcattctgtgcattccaggcaaaagatgggctcaaaactcgtcctggtgtctggaacaaaattcctgtcaatccttgcttagcagaatattgaacgttaattgaaccaggctcaaaatcacaacgtttggttaaatttcctgcggcagactgaatcttagggtatagttttgctacaattcctgaggtgtcgccttgatcactgtcgatgacgattgaaccgttttgccaggtatcatgcggattattttcatccaaaacagagaaattcgggtcaggagtaaaaccggcatcaatgtcttgattaggtacataaatcagggaatgacctaagaaattagtgattacatttgcatcttgatcgtcactgattgagtcaatataagccatcaagctgtaaagatagccatagcctaacttgttgataatctcaattaattgatccttatcttcgttgtcgctagcttgaacgtagctattcagcttttgccgcaaatcatctagcgtccgttcattggtgttagacaagtagccatcgacgtcagggatgctgtaagaaaagccgaaaactaagcgatacaagtaatccagatcggcacaataagcgtcccaatcatcatcactaatctgacctgccgtatcttgcaaatcgcgggcaaaattaaggataaacgaaatggctaaatgagccgcacattgctctacactctcattttcaatcattgttgcaatcttagtacctagaatatcatttcgaaaaatcatcacatcattaggcgactgcaaatacacaatcaaatcgtgctgctcttcgtcatattccacgccaaaagaatctgcagggatgagattattttgcaccaatgcttcactagcctgacggaatttagcagccaatttttcagcctctggtcgttcaatcggatcgcctattagattgctatcttcattgttacccacggcttgatcagccttatccggcgcattttttaatagagaaaaatcaggatctggcttgaacagatacgaatcattcgggatctccattaccatatgatagaccacgcgaccagctgcttcgtcatcatcagttgaacgttgcacttccttaggaatcgccaataaataagcgtcaggcatttgggctaattgagtttcagtctgggctaaaatatctgccccatatagaccactagctgctaaaatgctctgcaaattttctcgcacatcggccgtggacattttatccgtgtcacggtaatagctgttaatttcggcatttttttgcgtcaatctataccaagcgttgtatagataatccatatcctgacgtagctgcttaggatcaagatccacacgctcttcaggcttcgttgcgtccataaaactgccagccaagctaacgataatcccctcaccgttagaagcatcatcttgttcaagaatgtagccataagtctgatcattcaagagcaggctaggaatagtcaagttgttaggtgtctgtaagtaaatcaaaacactgtcatcatcaggattaagttcggcgctcaatgaattagggacaatgctgccgaggctgtaaatccaaccgattgcactgtcgattttgttaattacttgttttagttttgcatcttcagtcatggaaaaactccttcattattatcgaaaaatgctgtaagcaattacattttcacatatttacgcctcgattgcattctttttgccggttggatttggtttttggggggtgaattctattttttaagcagggaggggaataccaaaatattatcaaacaaaaagtcctgctttcatagatagtacaattttatatatttgtactgtctactaaagtaggactatatcacacaagccagcgtctttaatttttacatctaagccgcaggaatattcttcagctcattctgctcggccactctaaagaatgggagataaatcacaatacctattgcaatcaaaatacactcaaaaataatgtttctccaatccatcgagctcatgtaagcctggaagaagaatggagtaaacgatggatcaacaatataacccattccaatccagtgaagactttcagcaaagtaagtcaacacaatgttaataactggtgcaatcaagaacggtattcctagaataggattaaagcaaattggagtaccaaaaataattggttcattgatactacaaatgcctggaataattgaaagcctaccaagtgcacggtacttttcaactttactattcatcataagaatacacaaagccaacgaattaccagaaccacctaagacagcgattctgaacatttgcaaattcatcaaatgagtaggagcaagtccctttgcaactaatgcagcatttgcaccagttgctgctatacctgtagcaaatacaattgggaaaatgacattactaccattaaccccaattagccaaagcaaattacccagagtcacaatcaaaatgtaaccccataagctgttagctaaaaaggtagctggagttaagcatttcattataaaggtagtaaaatctgcatgagtcattccaactagaattagatctgcaccatagaaaataaagatattaaccagtaatggaatcaacgaattaataaagttagctaccattgggggaatagaatctggtaatttgagcttaaaattacttttttcaattaaacgattaatttcaactgcaagtagtccaataataattgcaacaaataaaccattcgttcccaaattattaatgtcgatcttattatttttatcaacagttgtagtgaccattaagaaagtaactaacgaaatcatcccatcagttgctggatgctctctgcggtatcctttgctcaattcatatgcgataccaaaagcacaaatcatcccaaacatacccattgtcatattatatggaatagtaatttgagcataatgagcgactgcccaatatttccaggcagcaatccatttcatgaagaaattagctgttgctggattatatttatccataacaattggagggttagcaacaattaagaaaaaggaaccaattaccaaaaatggcaatccgaaaagcataccatttgaaatggcctgtaaatgcttttcatttccaagtttttgtccaataggcgttaaaactttatccaatttagtaatcagtgattcttttttagcagtagtttcggccatcagaaatcacctattttctttactaaaacaaaacgctttttaattaaatttgatatggattgaacttgaatgcgttcggaattaccttactgtcatcccagttttcacgaatcttatgatattcgtcccaataatgattattcacctttaattgcggtgtaacttttgaatcaacttcaaggaagtgcatacttcctcttcccatcttcttgccacgtgtagtatgcttgtccaaagcataatccggaatcttagggacatagcctaaagcaaagtttttgattataatgttcttaagcaaatctgatgaacggtctttagttgattcacacagatagcgaatagcgtgaacaaacatcatagcacgatccggttcgttgtaactaaagttttgacgcatctgatttaagctattgataagaattggagcttttggattacccatgccgatatcttctactgaaattgcttgaagacgacgccataatttttcttccatttgtggggatgaaatgtacatctcataagcaaattcacaggcagccctttctttgcctttccgaatcgatttttgtaaggcagagataacttcatccgcagctaatccattacgtgttcttgttcttgcccatggatcagctaaaaattctctatctctgttttgtggcacttcgtttttcttaacatcattttctgacataatgagtccttcctttgacacacgaggagaaatacaatgaatattcaaaccatctgcgagaaatatcaacttaataaagatgaagaaaagatccttctttatatgaacgatcaccgttcagagctgaaaaatctaaggattcgcgaactggctaaaagaacattcacttcttccagctttatcgtcaagacctgtaaaaagatgggactttcaggatattcagaattggtctttctaattacagatacaccaaagttccctaataatactgaaaatgacttaaaagtaagatcttgcgtaaagcctttctccaatttgatggataagcataaagactcaatgatcatgatattgggcagtggcttttctcaaaatattgctaactatatgagtgagtatctaaatttatacggttttagatgtactgcaaattcacatcttgaattactccgtaaaaataaagacgctctaataatagtaatcagcaattctggagaaaccaaacgtttagcagaactgtgcattcatgctaaacagaataatagagatattctctctttcgtaggtgaccgtaattcaactattgctaaaaactcatcacttgtaatcagttcagatacgtttactccatcatcctttgatagtcattaccctcagctgttttttggtctaacactcatctattttgaattattaatgagttactttttgtctaagtaggtacctttccttaagacactttcatcataagcgctaggcaattgatttaaaaggttttagggcttattgaaaacatattcttatttttaaaaacaacctgaattgtcaaattaagtgcaacagttaggctatgaagaaatatattgcttgaagagttcttctgctgtgtgatattggaggattcagcgatatttgtggttaatggcattggttgcctgttgaacataagcttttgacttgtctttcatgctcttgcccttagagaagaattgacgcaaaagaccattgcagttctcattggtgcccctttcccatggagaatatgggtgagcaaagtaaatctggcagcccttgatcttggtcatatccgcaaactcagagccattgtcaaacgtgattgatttaaaccagtcaggatgtctgtcaatctccttttgaagcagcctttggcatgtacttgcccgatagtcaggaatcttgataactacttcaaagcgtgtggttctttcagtcaaagtcattaaagcaggctgattcttgcgtctgatgcctttaaccagatctccttcccagtgcagcggagcttttctgtcttcaacctccttaggacgctgttcaatggaattgccaagatgcttcttgtgcaaagcgtgaccgccatggctgtgatgacgcttgttcctgcgtcttttgagcttcataggcagatcaatattgcttatgtccaccaagccctgatcaatatacgatagacagtaggcgtgctgggacaagggtagcctggcatagtccttttgaattcaccaacgaattcatcaatgctggtggcatcaaatttagctttaaagcgtctggagagcattctcaaaaaaacagcataatgctttaatggatcccgtttatagtagtttctgcgtcgcttatcatgatagatttgtgcaatatcagcgtagtaatgctcatagagtaaataattatgatctctttgcaggacgctaccacgtctgatttcacggctgatagtcgatttgtgacagccaacctttcgagcaattgcggaacaggaggttatgcctgaatcaagcatagcttgaatttgtccacgctgctcacttgttaattgatgataatgtctagagacgctagaatttgaattagtcatgaagatcacctttcttgatttttggtcacttcaagttcaggtcttcatggcctttttgtttaacacttagtgttgcataaatccgggatcataaaaaataaccaacatccattaaaaatgttggtcataaatttactaaatattcttttttattacatcttccgaataaacgtgttcatatcgtatgggcctaccttgtagtcagagcgatccacttcttccagagcatttgtcttaatatagccctttttcttcaagaatgaaagatcaatagtttcactagtcatattggacaaacgcaataccatcgtatccttgatagtataagcaggataaagtgctgaaacttcaataccatctagtaagttaaggtctaagtaggattcctcatctgtgatcttcggcagattatctggaaattcaatgtcccagatcttgttatccaaacgatttacaaacaaattgtacttttgaatttggtaagaaacatttggactaagccatttatcaagacgtgtggcaatattcttttcagacaactcttctccagtaaatggagtaatgccaaactcaaaatcgttattgccaagttcttctgccatcggtgttggcgtcatgacatgtcccactgaagtggtatcacctgaagcacgacctggccgccacaataagtttgacttaccaagttgaccagtcgttgccattaatgttacatagatagaatcatcaactagctcatattctttctcgcctttgccaaagaagtagagaccatttttaccgtcattttggcccacagctcgatcaaaaatataaatattaactggcttttctacaaattcatcattccaattatcatctattggctcattcttagtctttctgaaaccgccttgaatttgagtatgagcatattcagtttgcatccttgacctcattctcaatcttaaacgatgagccagcacagtattgtttatatgcagacgacaggataataccttttcgccattggttagggaaacagtcaatttgaatgggacttctttcttttgcccatcttctttcaaacgatcatccagactgtaaggcaataaccatttaccttccaaaatcagttccttataggttgaggtttctttcttggttagttttccattccaattaagtctaatctcgtggtcctttcttagtggtgaaaagtcatacgtatcgccatcatttgcctgatcatagacagagataacatcataatattcttgattcttatctctcaaagtaaatttgccatcttggtaaacaactgtgagttgatcattggcaattgaattattgtccagctcttgcaaactagttaattcttgatcagcgtcttcaaagtgaattaccttgtaacccaagccattcattctaagcttaattaaaacatacagcttgtagtatccaggctcatctttaaactcaaagccgtttggtgtcaattgcatgatatttggtcgagttggagtatatttttctttaaccaaagtagcttcatatttatctggaaatttgatcttttttgaagctgacatgaacgtaattaatttataaccatcaaaatcataaggatcagtattaaaaactatgacatctttatcagttaagttcaagcgttgagcaattctctttttaatatagttttctaagccatcagcaatttcaaaagcctgcttaaatctgtgatcaatatcaactgcaacgttatcagttacactgcctcctaaagtatcgtgtggttgagaatcaaataattgcttccataatttaatcaataatccattggaaacttgaatacccgactttttagcgatcagcatcagaggctctactcgtcttaagatatcttgttcaagcttaaagttcttgcgcttgtttctggatctaacagaagcaatagttctatgcactcttgaataagttggatatctcaattcaccctggtaagtattgagtttctttgaacgaagccgtttcataaattcagggtacgtactaatttgaacatcatttttgctatattgattaatctttttaaccgtatcagagatgttatgaactatattcatctggtcaattcctgatgggattaaaacctcatcattattaccattcttagcctcaaattcaatgcctttgtccaatcgattcttaacaaaatcctttaaatttttctttgaagccaagtcaatctgacctgtatagtatcctaatggaaagttagcagcaaatacaactgaatttcctaatgcacgccacttgaagtaaacagaccctgcttgtctcttaaaattagtaccacgccaagaaagaaaatcatgaattcctacttgattaagaatcattggtaaattggcattaaagccgaaagtatccggcaaatagcctaacatcattgccctaccataatattttctggcatcattaataccaattaccaaatttctcaataaagattctgcagcaggaatatttgcatcagtctgtgtataccaagggccaataaataattgacctctttcaacaaggtcatgaattctttctttagcttctggatgaatttctacatattcatcaatgattgacatttgtccatctaaagtaaaattggcttctggatgagattctagttcatcaagaacttgagtgaataattgatcacttaatacttgagcatcttgagtggtaaaataccattctctatcccagtgtgtatggttaactaaatatgctttaaccatgttttgcctcctatttttcatacccaacgctttgaattattgttcttaacacgtctttggtttcattaattgttttacatttatcaattaaatttctaaactgttgattttgttgcaaatcaactaaaaaagtaaatagttcttgaatgttcggatagtctttcttattaacggaaatcaaaaagacatacttaatcatgtttttatcatcccattttatcggttcattcaatctagcaaagcttacctttgattgagtggcagcatactttatcggatggggaattgcgattccgccaccaatggccgtagaatatagatcttctcgtttatatacattgtctctaaagtcgctttcaacataatgatacttttctagatcatctatcattagatcaaggactttttccttagttaacttatctttaagtaaataaatcaatttaccatcaaataatgtactgagacgtaaaaagtagacaattaaaatattggattaatagaggcttgacttcgatactctttcggggttaagccttttaatctgctctttatcctttcgttgttatagtattcgatatattcctcgattgcttgagttaattcttgaagattatgatacttgtattcttgatcatagaacatttcagttttgagcaggccaaagaagttctccattagcccatcatccatggagttgccctttctggacatgctttgagtaataccatggagttttaaagctcgctgataacgagggctttgatactgacagccctgatcagtatgaaaaatgcagttattaagagctgtttctttggcaaaagccttgtcaagcattgtcattactaaatccatatctggatgtttggagatagtataagaaactatatcgccaccgcagccgtctagaataggcgataagtaaagcttttcattattaagatgaaattcagtgatatcagtataccattttgtgttaggcagggctgcgaagaaatcacgatgaattaaatttggagctattttgccaatagtacctttatagcttgaatatttgcgcttattgcgcctgatgcctttaagacctaatttatgcatccaatagcgaacggttttctccgtaactttccagccctctctgattaactgcaaagctactctgcgatatccatagcggccttgatgatgattaaaaatctcatggattctagcaataagctttgaccgtttaggcttggcgggctgtcgtttgataatcttgtagtatgagcttctggcaattataggtagctcagggtgctctgcaatcgcagctaatacataatttaaactaactttgaattcttgccttagatccgtaatcaccctagctatttcttctgatcttcttggtccaaggcacttagtttttttacgtattcgttcacaatacgcaatcgcaagttttcttctttcagctgctggatctctttctccagttccttgcgagatttctgcttttctttggtcacgggcagggcgtcctttctgtttgataatgacattatacccgtttttcttatattctctaatccaattgttaagcatgccaatacttttaaaccccagttccaaagacagctgtaagtatggtttattgccaaagattgcttgttcaatagttcgctgcttaaactctttggaatagctttggtttttagtagttaaaatttctattccatgcatatcaattaatctaagcatatagtctaaattagctagattcattctgtacgctttagccaattgactgattgagatattttcatctttccatttatgataaatttctattttttgttctttattaaatttagacatagtaaacattctaagctaaatagtgaattagttatccgacgggataattgattcactatttttattcttttgtagaattaaagtagtagtaaaacgatatgccctgaggtctttagacacttgatgtcgcataataaactggcagttttacttaagttttcaatagtctcttcgaagaatgtggacactagatgtcgagtttagaaaattagatctgatttcttaagtaaatacgttttactactaagttttggaggtttttattatgcaagttacttttggaattgatgtaagcaagtctacttctactgtttgtgaactaattggtgaaagcaaaaatgaactaaccattactaataatcgtcctggttttattcaattgcttcatgaattaaccgctttttctaaacatccgcaaattatttttgaagctaccggtgtttattcacgcagactgcaggcttttcttgaagactacggctatgaatatgttgttattaatccgcttaaagccaaaaaagagatgaatatggggctacgctacaacaagaccgataaaactgatgcttatcatttagctttaattcaaagactttatcgccatccggttaatcaaagcgaatcccaaacttataagcagcttaatgctttgagccgcttctatgaccagctgacaagtgacttggtaatagctaaaaatcgacttcaccaagctctacaatcgacttttcctgaaattgaaaatttattttcttctgctagaggtaaaaattactggcaaatagttgtgcgatatcctcattgtgacttagtaagaagagaagataaaaaacagcttattaactggttaatgagcttaaaggggattgcttttaaacacgctctaaggactgcagataaattaattgaattagcttatcaagcttatcaagttgtatcttgctctagcatagaagtcgagcaagtgcagtattatgcacacagattgcttaatttaagtgatcaaagagaaaatttaatcgcaagaatggttaagttagcgaagtctttgcctaatcatgatttagaaaacctagaaagcattccaggctttgcacagaccactgctgtcagagttttagcagagttaggagatttacgcagatttagtaatcctaataaaatcaatgcttttatcggaattgatccaggcagatatcagtcaggagaaatggactctaatttaagtattactaaacatggcaatgcagtcgcacgtaagttgctttatcgagctattggacaaattgataatgcagctaagacaaatccgtgtcatatagcagattattatgaaagcaaaaagctatcctctcaaaccaaagggttcaaaaagatagctattgcttcaattcataaactaatcagaaccatttatgccctgattatcaatgatcaaccatatgattacaacgtagccacacataatcaaaaagactttagtcgtaattaattgatcaagtacattataacgctaagcccaaaaatcagatatggatctgggcttatttgtcgtgtctaactaaaaaaataaatcgacactaaaagatgtttaagttgaaatttaaacaaaaaatgaagccaaacttcttattatgcttgactttacgtagaaaaagacctaaaagtgtctaacttttaggtctcagttcacaagttcataatgaccttatttttatccgaaactgaaacgaggtattgataaagttcattactatcattctgaaagttagataaatctacctgaattactggtaatttactttcataaattggcaccgttgaaattacaaagtcagtattttttaaatcactatgctgatattcatataatgaataaacacccacaatattcaaatattcactaaattgcgaagataatctagcctttagtaacatagcagtagcagttcctgagccgcataccaatgcagctctctttttatcccaacgattgttgtataacctttccattgaagcaccaacatgaagtgtgatgaaagctaactcatccggggataatttcatgttaagttgatgctctataagtggtgaagctgtcactgtcatttcataagccaatgggaaagttgaaacaattacatttagtaaaggattctttctttgtccattaatatttttaactttcagtagtaattccaagtgcttctctaaattacgaattagttctttgtcttgcatgagattgaaaacatagtcgtccttgattctatccaagaactcaatgacaatgtcatgtatctttttgtttttcacgtcattattactatgctccaacataagttgtggataatttagagctaggtgataaataaaataatgaaattctgcttcactatattccaattcatagctacggaaaacttcctcaaaaaacttagaaaccttatcaaaatattcctctctaatgtaagggatatttcgattaaaattacgaagctgattattagttttgctgcgagctaactccaatgctaagtgaatagtgatatttttatcactataatcagacataggaagccccagagctacgattaaattggtaacttttgtcagtaacttgtttaaatctaaatcagaaaaaatcaccttttctgatttagagaaacctcgaacataattattgcctcttttattatcgatataatcaataatgcaactacgaatatccgattctgaacctttcattcttaaaagatcgccatctttttgaatctttagatgatagtttttggctacctttctagcttctttcaaatacttatcaactgttgaatcactgatatacatagtggaaataatgtcatcaatctcacgcggtttggttagaatcaaaagaagaaaatcttttaatcgttttttatagtcgtcaccaccatctgtaacgataccactttctttaatccgctcgaccaaggacttaaacttttctcgatcattaataagtagatataagccatgtccccgtttattttttattgagacatcgtatatcttaagagaattattcaaattcttaatatcgcttcttaaagttctagttgtgacacctaactttgctgctaatgctttaggggaaatataagtatcattatttttagaaattaaagacgttaaaattgattttaagcgtggttgtgtaatagacatgcaaaagtcacctcatttctataaaatgtagcttatcatattatctaatattcataataaatagatactatcttatcatgtgtaagcttaggcaattttactgtattatttactacctctagctttttaagtggctcttcctttaaatctactaattctactttattaggagccttgttaaatttgagttcatcttccttttctttaaatgaagcattgtacagtcgaataacgtatcctttacgctcttctgctttttttactgtactagtagtaaattcacccttcgtttcaaaaagactatattcttcagggagctttcttttgactacattaaatggaaagattaatcttccatttaagaattccgcatattcaaacacttgcaacccagtcttaaattctttggcgacattagttacgtttgctttttcaaaatcgcaatcagtaatatatactccaaaatcaaaacttaagaccttcttcaattcagcagcgagagttgctacagtagcatcccctgaagctcggccagggcgatacaataaatcagcttttcctaatctgccataagttctgaataaggttaatcgaatagttgaatggtgttttccaatatcttcgtactcacgtacaccgttagggaaaatagcaaacatattgttcttatcagataatgaagtataagtttgcattgtattaatcgaaattggcttttcttgccaatcatttggatgttcttgccaatccaatattgccttcttcaattcaaatggtctcttaatgctgccaaattgaatatcatcaattgacccatcagtcactatttgagtatcaaaatcaatacataaacgatggtctaacggttggcgattatctgtaactaccctaaatccaattactgggttatctttctttaactttatctcaagagataccggcattaagacaaatgcttttctatgtgcacgttcatctaaatcagctggcactctaaaatcatagtcaatcttaagttcattaagcaaagcagatttattagcttttactttaaatgcttgatcggtagaataaattacccaatcttttttagctggtgaatagttataagaatctccatcatcgccgttgtcttctaagatagcttgtttatcgaaaacgcgcccatctgtttttcgggtgattcttaaacttccatctaaatttacttcaattttgtaatactcattttcaatcgtagtttgattgcttactgacagttcatctgcttttcctacattaggaatcaagtaatattgttgatatcccattggaggaatatttttgactactaggctaatctttgttttataaactttttctggctgataaattctatttcctgggtttaattgaacagttgcaccattaacttcttctgtttcatctttaaaaccggcaactacaaagggaataggttctccatctttatcttgaatctcaaaattctgcgctggagtgtatatggttttagtaactaatccactttttgcaacaggagtggtattgaagaccgttaacgtaattgccttgtcgtcaggcttttttatctgaaccgagatttgccgcaaagttagttcaactaaacttgttgccatatctctagcttgtttatatcgtaaatagatatcttcattaacattatctgaaacactatttgccattgaatcatgtgcagaattttcaaacattttttcccagatatcatcagctgcacctttaggataggaaataccaaattgggtacccaaagttaaaacaggttcaagaatgttagttaggtagtcttgaattaaagtattcattttcttcaaatcagatcttgaagaatagtttgttttatgaactctcatattcttaccgatattgaattcaccttttaacatgttcagcttaggtgctaccttatcaactgcagcaatatattcttctaaagaactaatcttaaatttaaaatctttatttctttcatttaatttttctattacttgaggtagattatttctcgctggtgccatatcagaaccttgaggaaaaagaatttggtctgttgttgcttgtttaactacactagcaaagggctcagatgtcataatcttatctaaattattttcatcaattagaccacctatgaaataaccacaggccattcgataaacattaattcgactgccatcttcacctttccaaataaattctgaatgcgtagcttcataattgggaaaaccacgccataaaacagctttatcaattcccaaccccttatagatttgcggcatactagattcctgcccaaacgaatcaggtacatagccaatattcatgtagcctcccaacttactacatattttcattccatataaaagattacgcactatattttcaccagatggcaaaaactgatctgtctgtgtataccatggaccaataataagttttttatttttaacaagattctgcactttctttaaatcttgtggacgccattttaaataatctgcgatcaaagatgcttgaccatctaaaataaagtgattaaaacctacattgttttccaaattattaattacatcttttagatcttttaataagtaaatctgtgcgcgagaggtagtaaaaaaccactccctatcccaatgcgtatgtggaactacatgaactgttttaaccataactaaccttcttttctaataaaaaagctatagccaaatttaaactagaggggaaaagtactttgttattgactatagctttttgtttatttttcaaattaactgatttattcggtagtaatgtctaacttaatatcgtcctcgctaatctttttaccgttgtcttcagtgaagttggcaactaatggagcaacaacggcaataaacaaagcacaggctaaaataccacaaacataagcaggaatattatcagcagttaagatacctggaataccacccaatggaggtatgtgtgaacttactcccattagttcaccaacgccagcacctaaagcaccaccgattacatttacaaagattaattgtggggctttcatccagaatggaatagcaccttcagtaataccgaatgtgccgttgatcaaatttgtacgccccatttccaaaagttgtggagagaatctcttcttaggccaaataaaagtcattaaagcataaccaagaggaatagcacaaatggcaatattagtgtaaagacatggtttgtaaacaccttccaggaagaagaagttaccagcagcccaagcagctttattgacaggaccgcctaagtcaacaccaatcatgccacccataataagagccaaaatcaaaccattagtatggtcattaaccatcgttttaatccaagccaacaagccagtattaatccacgctaatggacctgcaagaattaacccattgacaatagctacagcaccagttgttaacaatggagttaagatcaattcattggcagaattccacttttcaggaacattaatatgtttacgacaccaacgagcaacgtaaccagcaatgaagccagctaccatagctccaataaaaccttgttgagtattagtagctaattgaccaccaataaaacctgcacccaatgctggtttatcaccaatggcataagcaatataaccaccaattactaagttgaccaagccaatacctatccaaccaacttggttgacttgatacagcatatggaagaagccagtagctttagcaaatttacccagatcatttacaccacaagccatacctatcaattgtgggataccaacgataagggcaccaccaataattgtaggaatcatgtaggaaatacctgtcatgatatagccttgccaatcatgcattagtttcttaaatttcatcattttactcccttcatttcaaagtagttaaacattattctgttaaactaggcacctttgactacagaaacgcatttcttaagaagagcttctggagcttgaatacaagtattaatatcaactctgataactttctttcccttaaaacgatccattccttcgatcttttgatcagagccaattaagacaaaatcagctttctgggcttcttcaggtgtaatttcatgaactcgacccataattccttgctgctcgatcttaacgttgtaacctaatttctttccggctaattctagtgccttagctgccattggcgtgtgagctagcccagctggacaagaagtaataccaacaatatttacatcactcataatttattagctcctatctttttcctaatatactttgcaatttcttgtgaatcgtttaatgttttcaagttttgcttaaaatcatcttccaataaagcagtcgacagattggcgagcatctttaagtgagtattacctgcatttttaggtggtaccattaatgcaaaaacatctgtaactggtttattatcatatgtcttccattcaataggtttctctaagcgaacataaataataccaactctttccacagcttcagatttagcgtgtggaattgcaaatccatcttgcaatcctgttgaatattcttcttctcgctttttgaatgatcccaacagaccttcaggatcattagtaaagccaatttcttcagcatattcagaaattttctttaacaaactttctttatcagcgacgttcacgtttaaaagaacatcttctttttcaaacttcattaaatcacctctcgtattatataaattgtaattagtcatattgtgataattaatcaaattagtatttgctttttgatcttcacatgttagcctctaattgtcattggctttggtcaactggtctaggttatcacctcctgcagttttgtctgctttataagtctgccacccaggcagttcctttatgctctaactcacatgctgtattgattgcttctttttgctagtccttgagcaattgggattaggtgcagctttcaaagaagcaaccagtgaatacttatactggcgagattgaacttaagaactgtaattaggggttaacatgtgaagatcaaaatctatgatcagaaatttgaaagaaaggaggccatttccaatgaaattatttgtcggtattgatgttagttctaaagatttacaggtcgttgcacttgattcagaagatcaaaacaaacgcttaattaacgatagctttgtcaatgatctttatggtgctagtgaactgaaaaaacaaattttagatctagctcaaaataaacactatgatcaaatcattattggcatggaagctacatctatttacagttttcatcctgcttactttttccaaaatgacgaagatttacaaaagctcaatgtagagactgatgtaattaaccccaaagaaaccagcaggtttcataaagtctttgaagaaagtaaaactgatcctctcgatgcttattacattgctttgtatctaagctttggacattatcgagtaagcattgccagacaagacaactatcttgctttagagcgtttaacgcgtaccagatatgaattagttcaagaactgactcgtaccaaacagcacttcattgaagctttatattatcgggttaataaactaatcactgtcgataaagataagattaatactcctcttttcggtgctacaatgatgtctattgtaaccgatagtaaaactctggatgagatcgcggatatgcctaccgaagacttaatttcttacttacaggttaaaagcagaggacgcttttccgatccagataccttggctaaagcaattaagaaagctgttagaggttcatatcgcttaggcaaagtaatgactgattcaattgatgcagtgctttctgttcattacaacatgattcaaagctttaatgaatctattaaagatctagaaaaagcaattgatcgtatcgttgatgcattaccagaaagcaaaattctggaatcaattcccggtattggcaaaacctatacagctggtattatcgctgagatcggaagtatcgatcgctttgataaagaagaacagctggctaagtatgccggcctaacctggaatcaatatcaatcgggagatcacagcaacgaacatactccaatggccaggactggaaacagatatctaagatattacttgattgaagctgccaatctagcaagattacatgatcctgttttcaaaaaatattaccaaaagaagtatgatgaagctgtctactcgccgcataaacgtgcttgcacattaactgcaagaaaattagtacgagttatctttaaattgctcaaagatgacaaactgtacaggacaccgaggtcttaatttcaaaaattggtctaaatttaaaagtaaacaaaagtttaacattaaaaaaatcaacctttaccaaggcttagtttcatatactcaaatttatgatcaaaaagaacaaatatcatcgcctttcatttgacttattaccacatgacttgtccgttgggccttctttgtaaccccttacatctaatatgattgcatattctcttctataagtaatgtctcctaatttccacttaaagtggaaattaaatatttataaagttacgtcatgtcctaaatagcttaataacagttcacaaaacatcatatttgcccatgaaaaccacggtcgagtaaaatcactaggatcattaggattaaaactctcatgaatcatattgctaccattggttgtgttagccattaaatacaataaattctgtttttctgctttagtctcttgggttaaccctactaatgccatacctattggccagatatttcctttaggagtatgcggacttccttgaccactccaatattcaccaatatagaaatatggattatctggagacaaaatgaatcttcttgtgttttgataaatgtcatcagtaggtttaacgtaaccaatataaggagcagacattaagctaggaacattactatcatccatcagcacatagttgcctctaccatctacttcataggcatattgctttttaccattgtgctcaacaataccatacctttgaattccttcattaatttcattttgcagtgttttagcctttgcaactatatctgaatcatccaaaatacttgaaaatatttcttgaatataatttaaaactactacggcaaacatgtttgaaggtatcaagtatccatatgtacatgcgtcatcactcggtctaaatccagaccaattcattcctgtatatgccacaggcgttcctttacctttattctttaaagtatcagttggaacatcacagtccctttcaaaggtgtagttagaattctcatgatgttgctcagttttaatagttgccagcatctttttaattccagaaacaaaatttgcatcaaattgagctgtttcacctgtgttcttatacagtagatatgccagctgtactggataacagagtgaatctaattcatattttctctcccaaatccagggacccatttttgctttatctgtttgatgaccttgattattggcagtcatattaaatgcattagcataaggatctaagttcatattaaaaaattgccgttttactactcgagtaataatatccttaatgttatcgtcagttttagctaacaataaatatggtcttaattgtgcagatgaatctctttgccacattgccggaatatcaccggttaatacaaagatatttttattttcatcgacctttaaagcattctgcaaagtatctaagaaagtcttgttaaaaattgtatataaacgttcatctttagtgccacattctgaaactgtcaaatcttttgtgtaaatagatctttctcgtaaattgattttttaattatttatttaatcaaagtaggattctaaggtgtcctgaacctgaccaaagcctttatgaattcgattgaaataacggtcattgtagctcattgcctgaatgccaataaaagcatcaagcgactgttcagttggaaactctgccttaggcttagctttgcgcttgatcacattgttaaatgattcaatcatgttagtcgaataaattgaagctctgatctgcttgggatagttataaaagaccagcagatctggttctatgtctttcaagcttctgataacatggctgtaaaccttgccccatttggtatagaagtcatgcaggacagctgtggcttcttctttgtttgtctgttgatgcacctgtttgaattcgttcatgatcttttcacgatcgtcgacgcgtactttagcgcagatattgcgcatgacatgaaccaaacagcgttgaaaatgagctttaggataagtcctggccaaggctgttttcatgccaacaacaccatcagaaagaaaaagctcaacttgctttaagcctcgggatttcatgttttgaagcatatctgtccagacttcaatgttctcgctaggtgcaatgcagtagtcaatgacctccttgtgcccattaggcttgatgccaatggcaatatagactgcttcacgctcaaatgtttctcggcgcaaaggaaggtatgtcgcatccaaatagacgcagaaaaacttgtcgcttagcttgcgtttgtggtaagcctcaacctttggaatcatctgcttggaaatatttgatacctgagctggactgtaatggctgccatacatcttttcaattagatcggctatttccctggtggtcacgcccttggagtaaagcttgataatcatgctttccaagatatccgagtgctgcttgtagtcaggcagcgtgtgctgatgaaattgaccgttgcgatcccgaggcacttgcacttcaattgggccaaattgcgtatcaactttgcggaaataagcaccatttctagagttgccagtattccagccatttctggcatagggatcatagcccagaaaggcggtcaattcagcttctaacaagttattaacagcctgttgtagctctttgcgcaataaatcatttattttgtctggattgaatagagcttgagcaaaatctttggtaaaatcattcatgaaggagttcttctttctgtatgtgtttttttgttcaaaccaatcatacgagaaaggaactcctttttctaatgtttaaagaaataaatttaaggaatcattcatccttacacaaactattttacagtctccacattctgcttccacttcattcatataattctttacttgttcatcaataatgtctttcattattttcacccccagccaaattataaaacgcttttataattaaaaagaagacattacttttcaccttattgtggaaaacaaataagccattgcctgtatttttacaaagcaatggcttattcattattaaacggttattcctcacccggtgcagatataactattctcattttaccagtgaaagtgaaattcttcatctcatttggaataattaaattagttccgatcttcaaatcatatgatttgccatcggcttctaattttccttcacctttaataactgaaactaaaagatatggatgatcctttaagccggtcttccatgtaccatcgaggtcaatttgccataagtagaagtgtggtgaaacaggtggttcaactaaagtcttgatttctgcatcttgatccttattagtcttaacatctagcttaggatcaacatgtggcacagttgtaacatcaattgacttttgcgtatgaagttcacgctttttgccgtctttaccaacacgatcataatcgtacaaacggtaagtaacatcacttgattgctgagtctcaataactaaacagcctttagtcaaagcgtggatagtacctgcaggtacgtagaaaaagtcgccagctttaactggaacctttctaagtaatttgtcccattcgcccttatgaatcatttcagccaattcttcacgatttttagcatggtgaccataaataatgtaagcacctggatcagcttgcatgacgtaccaactttcggttttaccagaatcattttctaccttacgggcataatcatcatctgggtgaacttgaactgaaagattatcattagcatctaagaattttactaataacggaaattctttagccttaggattaccaaaaagttcaggatgctttaagtaaacatctcttaaagacatccccttgagtggaccctctgttacaatagaagcatcgtccttgtagccggaaatgatccaagcctcaccgacttttccatctggaatatcataattgaaaatatcttttaatttacgtccgccccaaatttttggtctaaaatacgggatcaaaaataatggttccatttaaaatcacctcatttttactttagctcatttaaaatcatctagaaaggtatggcttttctttcttttgaagaaaaaagatacacttacgaccacatatttcaagttggtttggatctataaaaagatataaattttataatatcagtcggttataaccaattaattatttatgtaattaggatcttatttcgtgaaaccgtaaaatagtttgtgtaaggatgaatgattccttaaatttatttctttaaacattagaaaaaggagttcctttctcgtatgattggtttgaacaaaaaaacacatacagaaagaagaactccttcatgaatgattttaccaaagattttgctcaagctctattcaatccagacaaaataaatgatttattgcgcaaagagctacaacaggctgttaataacttgttagaagctgaattgactacctttctgggctatgatccctatgccagaaatggctggaatactggcaattctagaaatggtgcttatttccgcaaggttgatacccagtttgggccaattgaagtgcaagtgcctcgagaccgcaatggacagtttcatcagcacacgctgcctgactacaagcggcactcggatatcttggaaagcatgattatcaagctatattccaaaggcgtaaccaccagagaaatagccgacttgagtgaaaagatgtatggcagtcattatagtccagcccaagtatcaaatatttccaagcagatgttccccaaggttgaggcttatcacaagcgcaagctaagcgacaagtttttctgtgtctatttggatgcgacataccttcctttgcgccgagaaacgtttgagcgtgaagcagtctatattgccattggcattaaacctaatggacataaagaagtcattgactactgcattgcgcttagtgagaacattgaagtctggacagagatgcttcaaaacatgaggttcagaggcttgatggaaattgagtccgatctgctggtcttctataattatcccaaacaaatcagagcttcaatttattcaaccagcatgattaaatcctttaacaacgtcatcaagcgtaaagctaagcctaaagcagagtttccaactgaacagtcgcttgatgcatttattggtatccaggcaatgagctacaatgaccgctatttcaaccgaattcataaaggctttggtcaggttcaggataccttagaatcctattttgattaaataaataattaaaaaatcaatttgcgagaaagaactatttacacaaaagatttgacagtttcataaattatctatcactagttactacttataagactaacatcttacttaatcaaactttaaacaaaaaaataagaggtgaactacaacatcgtcacgttatagttcatctcctactttaagttgtttgacaaagagtcacattagctagtctctgtctcttactacatacattaatagttaagaagtggaaattaattaccaaagcacctctatttcaatgaacctgggaatctaaattcatatgaactaatcgggcctactatatcaagactagttatttgtttgactaattcttgaaataaaattattgcgttattaacaccataattgtttactattttttggattttttctggacttttaactttttttggattctcaatatcataaaaataatccactttaatatttaaagtcctatattcagaatcattatcattttcttcatttgagcaattggcatgccccgataatgtcacaattgcatcgtttgcagaaatagccacagaaatatcatcaaacataaattccaaatagaaactgtcttgttgctgttctagttcacctttgtattcataattaagtttattaattataaatccattatatttaagctgtactgacatcgttatctcctatttctttaccatttgtggttgaaaaactgatttttttattcccacctgatagaaagacagtgtcttttgtttattagagctttcgtttatcttcatctttgctattactttagaagttttatgctgtaatgttttattatctatttcttttatttttattcgttttcttgaaaaactagataacttatttaaaacttgctgatatttttcttcactactttctaaatcaattccctgctcaacttctgtatacgtgcttaaactcaaacccgttaattttgctgcttcatctctatttaaattcaaactaattctttttccgaaaatcttttgtgataactggaattgatatgaatttaatctactattatttggattgattttattgaacttcatgtctttcgtttctccttcctataaaattcttttccctattattcaccaattgattatgaattagttcagccagtttcccaagttgatcagtaagtaaattcatttttcttatttttctttgatctttagtaggaaatttagtaaatccatatgtccagacaaaatatactttactctcatttaatgtaaataaaattctacagtttttccttacgccttcatttgtttcagaaagaaagcgaatctcatatacatgattttgtgacatcaattttttaacaatctcgtacttgatatatctgttagaatttggaactttatactcatccttaaaagaatatccaataataatcccttcttttacttcgggctttaattgttcaatattaccactactatctaaagtaacatttgaaagaaagttgataattcttaacaccgattcttgaatattaggattaagattatattcatcttctaaatattcttcggctaatttttgctcagacaagttatcatttatcaaatagaactggcgcatgggtcactctcctttgtctaaacattttacgtcaaaatcatgatattttccattctttgttgaactacagtaagtgttaatgtttttgcgatagactatcagccatagtctaaccttattctttagcttcatcaattatatcagcatccccaacctcagcacaaaagaaaaccgactccataatattccctgtcaatagctttttattccatcaaaaaaggaggacatagttctctttgataaaaaatctattccactaaatattttataaataaaggtgatttctatgtcctctcttaatcattgtattaaatcgagcttgacattaaagatgaaaatatcgtttttaaagcttgtttgaattcctgaattgtcaaattaagtgcaacagttaggttatgaagagatatattgcttgaagagttcctctgctgtgtgatattggaggattcggcgatatttgtggttaatggcatcagttgcctgttgaacataagcttttgacttgtctttcatgctcttgcccttagggaagaattgacgcaaaagaccattgcagttctcattggtgcccctttcccatggagaatatgggtgagcaaagtaaatctggcagcccttgatcttggtcatatccgcaaactcagagccattgtcaaacgtgattgatttaaaccaggcaggatgtctgtcaatctccttttgaagcagcctttggcatgtgcttgcccgatagtcaggaatcttgataactacttcaaagcgtgtggttctttcagtcaaagtcattaaagcaggctgattcttgcgtctgacgcctttaaccagatctccttcccagtgcagcggagcttttctgtcttcaatctctttaggacgctgttcaatggaattgccaagatgcttcttgtgcaaagcgtgaccgccatggctgtgatgacgcttgttcctgcgtcttttgagcttcataggcagatcaatattgcttatgtccagcaagccctgatcaatatagcgatagacggttggtgtgctgggacaagggtagcctggcatagtccttttgaattcaccaacgaactcatcgatgctggtggcatcaaatttagctttaaagcgtctggagagcattctcaaaaagacagcataatgcttcaatggattgcgctgatagcagtttttgcgacgcttctcataataaatctgtgcagtatcagcgtaatagtgctcatacaataaatagctgctgtctctttgcaggacacttccgcgtttgatttcgcgactgattgtcgacttatggcagccgacttcttgagcgataacagtacgggaagttatgccggaatccagcattgcttgaatttgtccacgttgtacgctggttaattgatgatagtgcttagaaatgctagaatttgaattggtcataaagatcttcctttcttgatttttcgtcacttcaagtttaggtcttcatggcctttttgtttaacacttagtgttgcacttcaattttaaatccgggtttttaattatttatttaatcaaagtaggattctaaggtgtcctgaacctgaccaaagcctttatgaattcgattgaaataacggtcattgtagctcattgcctgaataccaataaaagcatcaagcgactgttcagttggaaattctgctttaggcttagctttacgcttgatgacgttgttaaaggattcaatcatgttggttgaataaattgaagctctgatttgtttgggataattgtagaagaccagcagatcgggctcaattccttcaagcctctgaacttcatgttttgaagcatctccgtccaattctcgacgtttgcgctgggagcaatgcggtaatcgatgacttccttgtggccattaggtttaatgccaatggcaatatagactgcttcacgctcaaacgtttctcggcgcaaaggaaggtatgtcgcatccaaatagacacagaaaaacttgtcgcttagcttgcgcttgtgataagcctcaacctttggaatcatctgcttggaaatatttgatacctgagctggactgtaatggctgccatacatcttttcaattagatcggctattttcctggtggtcacgcccttggagtaaagcttgataatcatgctttccaagacatccgagtgctgcttgtagtcaggcagcgtgtgctgatgaaattgaccgttgcgatcccggggcacttgcacttcaattgggccaaattgcgtatcaactttgcgaaaataagcaccatttctagagttgccagtattccagccatttctggcatagggatcatagcccagaaaggcagtcaattcagtttctagcaagttattaacagcctgttgtagctctttgcgcaataaatcatttattttgtctggattgaatagagcttgagcaaaatctttggtaaaatcattcatgaaggagttcttctttctgtatgtgtttttttgttcaaaccaatcatacgagaaaggaactcctttttctaatgtttaaagaaataaatttaaggaatcattcatccttacacaaactattttacagtctcaaaataaagcctatctctagtttaacttagaaataagctttattagctaaattttataataatattttatcccggatttaaaattgaagtgcaacactaagtgttaaacaaaaaggccatgaagacctaaacttgaagtgacgaaaaatcaagaaaggaagatctttatgaccaattcaaattctagcatttctaagcactatcatcaattaaccagcgtacaacgtggacaaattcaagcaatgctggattccggcataacttcccgtactgttatcgctcaagaagtcggctgccataagtcgacaatcagtcgcgaaatcaaacgcggaagtgtcctgcaaagagacagcagctatttattgtatgagcactattacgctgatactgcacagatttattatgagaagcgtcgcaaaaactgctatcagcgcaatccattgaagcattatgctgtctttttgagaatgctctccagacgctttaaagctaaatttgatgccaccagcatcgatgagttcgttggtgaattcaaaaggactatgccaggctacccttgtcccagcacaccaaccgtctatcgctatattgatcagggcttgctggacataagcaatattgatctgcctatgaagctcaaaagacgcaggaacaagcgtcatcacagccatggcggtcacgctttgcacaagaagcatcttggcaattccattgaacagcgtcctaaagagattgaagacagaaaagctccgctgcactgggaaggagatctggttaaaggcgtcagacgcaagaatcagcctgctttaatgactttgactgaaagaaccacacgctttgaagtagttatcaagattcctgactatcgggcaagcacatgccaaaggctgcttcaaaaggagattgacagacatcctgcctggtttaaatcaatcacgtttgacaatggctctgagtttgcggatatgaccaagatcaagggctgccagatttactttgctcacccatattctccatgggaaaggggcaccaatgagaactgcaatggtcttttgcgtcaattcttccctaagggcaagagcatgaaagacaagtcaaaagcttatgttcaacaggcaactgatgccattaaccacaaatatcgccgaatcctccaatatcacacagcagaggaactcttcaagcaatatatctcttcataacctaactgttgcacttaatttgacaattcaggaataatattttattcttttaaagaaagaggggaaattatttactattcaactttagtaattctatttacaaaatcattgtaatttttgctattaattaaatctgccactcgtttatcatcaataactatagtagaaagatcatcaaaaacttttctaaattcatcatcatcttttgaactataagctaagacaaagactaaatatattttttgtcctaaccaatctactcccttgggattaatataaataaaccattgactaaatttagaatcataatcaattgcatgaggaattgcaactaatccaaatgctgtactagatattttttctctttcaagcaatttattttcaaaatctttaccaactattcctgatttactcatcttagtagaaagttctgcaattactgctttgtaattcttatgtttattgtctatatagaaattattctctgaggtaaattgttttaatcctatccttagcctttgagatcttagaactaatttaatttctctaattactttctgtagtttggtaacatcattagataggaaaaaactagaaacataaacagtattaaattgtggaaattgttgattcgaatctactacaataattaactgcgtttgtcttaaaatttcatttacatctgataccgtatcaagaagaagcaaatcattaccaaaagaagaatttatttgactaactaatctttgaacatttccatggtaatcactcataaataactgacaaattattttattttctttttgaatttgttcagctactgaattgcccacatgtaatgcaataaaggctatttcttcttcattaatttctattccatacgcctcattaattgcatatgctattaaacaggcacattcataaatcgttggagatgattgtttaatattattcatcagcggattatgaatagaagaactacttttatacctttcaattaacctgattaaatgtggtaaaaatctcttcttaaacagtttttcatcaagatttagattataagttctacgaacaaaaccgacaatttttctaaatagatcttcaattttatcatcatcttttaattctattttttgattagataataataggaacatttcttccaattgccgaacatcactatttgaaagaactactttttgcttattttttatccaattaactatatcatttactatctctaaattgcttgtggtaattgataaattgtcattacctcgatcaatcataataatagtgtgcagtaacaaattattgaaatcgaagtcatcaatcttaaaattatttttttcaagatatttattgagtgcctttttaacggatctaacatcaattgttttaaaattattttgaataattttttcggttaaaagtgttcctttcaattctcgatagattaaagcagataataatttacgtttattcctttctgtacctattacttcataattatcgcccatacgattcaaagtaagactaaaatcacttaactctacttctaaattttgaatttcttttcttaactctacttcattaatatatagtgtttctgataaatcataaatattaacagaactgtctgcttgaagtaagtgacgcagtagccagactttcctttgagaatacgtttgtggcaaaataatagtgctgttttgttcaaaagaagctttatcaccttcatatctgtatccttgtgaactactttttattttaataccagcctcacgaagacttttaattttatttttaattgtgcgctcagttacacctaattgcattgatagcatttttgcagtcatccaggaagaactattttttcgtaggataattaataggtcattattattccgcatcgttagatctcccttctacatattattcaagattagaatgcatttctcttaacttatgagcatttatatagcctttctttaacattcgcaaaatcaaagtatcaaacaacagcaaagaatactgttcatacaaagatcccatcggttgaatagatccagtataactatcttttgattgtgcattaattattatcatcttatcgctcttcttagctaaaggcgaattttcatttgtagtaaaggtaataattaatgctcctaattttttagctgtttcagcttgtgaatttaataaagttgatgtcccactggctgaattaaaaatcaaaacatcatttttcgaaatagctggcgcagtaagttcagaacttaaatgagtatctaagccaatttgtgttaaccgattagctaagcccgcaatcatcagaccacttctaccttcaccggataaaaataatgttttagcatttaaaattatttgaataatttcatccatcttattaacagtaagtgagcatgatgtatgttgcaattcattactaatagctttaaattcacttaacacatctaactaacctccttatttaatctttcaccaacgtcaccagaaggatgattggctaaaaagttcttcttattaaaatttttctttttcattaaaatgcaagctacaacatcaaataatgaaatgacagctaatgagctggttgttgctaacatattaaattcatctatttcttgatcaacttttactttgacaatcatattagctgctttagctaatactgattgaggactttcggtaatcgttataatgtatgcatttttctttttaatattttcaataaaacttgttaattccttagttgatccaccttttgaaatgaaaattactaaatcttgcgaatcaacaacacctaagctaccatgtactgcatcagatggatttaaataaaatgatctaacaccaattacatttaaagtatgagttgcctttttagcatccattgcagaagttccacaaccagttaacaaaatgttgcctttacaattttttattttttcaactagttttaaaacatcgttattagaaatagtatttgctaatttaataatctcttgtccttcttgtcgaaacaagtctatgaaattatcatcactcattatttatcacctataatagtaatagaaatatgacgttctcgctttcttgtttgatcaaaatcagcgaagaaaatctgacctaccgagcctactaaaagttcagcatcttttattcctaatgaaacatttgagcctaataaatctgctcttaaatgaccatcagtatttaacattgtccatttaacagctggataattagggtctgtttttttcattccatatgcaatatgttctggaccaggacttagatatgggtagttttccgtagtttgtctgggaataatcttttgcaaaatatgattcaaatctacttgtaaataatcatcgccataatagttcttatcatgcatgtactcatcaaaataaattgaacaagtagtatgtgtggtttgaactagacaaattccatttcttatcccactatctttaacagcctttttaacatcattagtgatcatatgatatgaaggacgtccttcaaccgtttcaacagttaattctttaaagaaagtactcattcttctatttccttctttacttcattccaaacttcatctgcacccatgccagtcaataaagcaacaccgttaataactctatctttaatctcatcaggaacaatggttgtactgataacaatgtcataatcattatttttaatattgtcgacttcttctgtaacggcagattgtttaatttctacttgatcttgcaaattattctcctcaagccaattatttactttagcgtgaacaatagttgaagtagcatgacctgcaccacacataattaacatctttttcataattacttaccttcttcttgatttaaattatatttcttaacaacattgagatagaacaataatcctaaaagaacaacaattaaaataatcaaacctacaacgcctaaattttgtgacatccaaatccaaattgcatttgtccataagccagctaattcaaatgaaaattgaccttttgttgcaatactgtagttagccaatttgaatgtcttcataattaatggactcatccaagtagctaaataaagcattggaatagaataaatcgtagcaccgattaaacttctaacaatatttcctttaaatgcaccaactaataaagtaaatacataaacataaagagttaagtcacctaatggtaatactttgtttcctggaagaataacagccaggaataatgaaataggaatcattaaaacactagtagcaataacagcgggatgtcctacagttaaagctgcatccataccaacattaactttcttaccatgtaagtgtttctcagtaaatttctgagttgctgaagaaattggtgtcaaactttccataaacatggaaatcatttttggcataatcttcaaaacagcagccatttctgcaccaaattgcaacgtctttgaaacatcaaatccagctaacaatccaatacctacaccgacaattaacccaataactaatggatcacccaagataccaaaacgtttttggatcttttccggactagcatctaacttattaaaacctggaatcttatcaaataaccaatttaaaggaacagctaaaaaagtagcagataatgccatcatgtgagtaactgcaataccaggtaatttaaagaatttaccagtaataggttgcatcaagtcagccataaataattcaagtaagaaaccacctgcaatcgctataattgcgtaaatataattattagtaactgcccaaactaacaaaccaataaatgttggttgccataaattccaaatatccacattaagcgttcttgtcattccaagccaaattagtactaaattaattgcaatagttaacggaatagccaaagctcctaaggacgatgaaaaggctaaaggtccaccaacaccacaaccaacatccataatacttaacgacatatggtatcgtgcaaccatcaatttgattgcaggctgtagatctgcggccatcatattaacaaccatgtttaatccaacgatcaaacccaaaacaattatgataattgggatacctacagttgatcctaaccccaaaaaccaatgtagagcttgtgcaaacatttttatttctcctaacttaatttaattgataatgttttaaaatcttttcaacagtattttcattatttgcatgaatcaaatcttctactgcctgggaatgttggcacatattcatcaaattactcaataaattagcctgttcatgaggctgactcatagcaatcataaacactaaatttacctctacttctttagttgcatctaccatattcttaaagacgactggcttttttaaagaagcaacagcaatttgtgatttattaacataaattgaatctgtatgcggaatggcaattcctaagctattttctactggcaatccagtaggaaactttttttcacgcagcaaaacatgattagtaaaacttttcttcactatattcttttgagttaaaattttcgctaattgagtaattacatccgtatcacttttagcatccatacctaactcgataattctctcatcgaaaaacaccttagctcctcctttccttacgtttttatagtaagcgctatcatccgataataaaaaatctatttttcaccccggggtgaaaaatagattttgcttcattcaattttacctaataatattatcacgaatagctaaggaaaggagactattaataatggttaaaatagcaacatcattacacagtggccctaaattacacatgagtgaaattttagatcaattaaaaaaggcagatgttgatttactacatattgatgttatggatagcatatttgttcctgaaatagattttggttctaattttactaaagaaattagtcaatatactgatattccacttgatattcatatgatggtaaataatcctagtcgcttaataaacgaatatgctttatctacaacaactgatattggcattcattatgaagccacacaacaattacaccgtgatttattccaaattaaacagcttaataaaaaagctgaggtaattataaatcctggaacaccaataaattcgctatctgccgttttaaattttgttgatcaaattatggtaatgtctgttgatccaggatgcagtggtaaatcaccattcattccagaagtggcaagtaaaattaaaaagttaaatcaattaagaaaagaaaagaattatcattatctaattgaagctgacggtggaataactgacaagaatctaaaagtactagttgataatggcttagatatagctgtatcaggttcttttatttttaacggggatattagacaacaagttcaaaaattaaaagaaataaaataatagaaatatataaatattcattcaagaaactatctactaaagcctgttaataacttacataagctattaacagattttttattgcattaaattcgagctgaatatatcattttcagctccatttcttgattatacgatctctgagatccacacccttaatctagtttaattgaaaataaacatttatgggcccgtttgacagtcgaattcaatattccattctgttgtcgacctcaacctcaatctaagtataagaaaaaaggtagataaaaacatcgtcatgtttctatctacctttatattttagggtgtttgacaatgagccactcttctttgattataaaatttctcacttcattacttatattttataaatttatttttaatccccttcattatagaaattatggtcgcattatttaaaaatattaaaatggcaccataaattacaacggaaaggattatagaaaataaagttttgaggaaaaaactttcccatccaatatcacacaaccaacaaattaaaacaattccactacaacccaaaagtgatgataataaattatttctaaaatttcctgatttaataattttagaaattatatctctcgaaaaataaagattagatatcatcatgctagcttcagctgcaactgtagataatgctgcagctttttcactccaaaatggaatcaaaataaggtttaaacaaatatttataattgcactaataactgtaccaataagtacaaatttttcacgtttgattggtattaaaacacaatcagacattacccagctaaataaagaaaatattagagcgaaacataaaatttgtaaagatggagttgctgccaaaaaagagcgacctgagataattaaaacaacttccttacttaacataaacaagccagtcattgcaggtaaagtaaacaaaagtagcatatttattacttttgttagtattttattatattcattcattcttctttttcccattagcattgccaatctaggaacggtaactattaataaagaagctaataaatttttaataatagaatatacttttgcagctacactatataatccaactacatatgtatttttcataattcctaatatagttatatccgaatttacaaataccataatagcaacattagaagcaaaaataataaaaataggtaataaatgatgtttccacgggatatcccatgttaattttacttttacaaacatccgtgcatgtacaaaattaaagatatttgaacctacgcttgaaaaaactgttattatagcataattaagataatcattcttacttcttacaaaaataaatagcaatattagggaaattatttgaaaagaaatgctacgaacagttatatacgcataatcttcatagattgaatatacccaatccattccaagtgtagtaaaaaatatttgaacagaaaaaatcaaaatacatgacacataatcatgcaaattagtaaaaattattaaacaggcaaaaagtaagatataagaaacaagagtggaacaaatatttattgtaaaaatttcactagcaaattcatttatttgctttttatcatctctatattttgcaccttctcgaatcgcataagtactaatccccaatgcagcgattaataagaaataactaacaattgaatttgaataattataaacacctatcccctttactccaagtactcttgatacataaggaaaagtaattaatggaaacagtaagtttaaggtgctttttaatccatttaaaaaagcattcagccccaatgatttatttttcattttgcttaaactttctacttaaaactcctacataccctataaatttaaaaataggataacaatattttaatgagaaaatttctattttatatctattatttaaagctgcataatccttatatctctttatataggaatatagttttttttctttttttatatctcttaaatttagtctatgaaaataagaaacaatactaactattgtttcttgatgaaacttatgtgctaaatcaggatattcatgctcaaaaaaatcttccatttcataatgagaatgtgctgaagcccccaaatttttcacggaaacagtatgaattaaacttccttttctctgtctataaaaatataaggaactagatgtcataaagaatatattagctttattatataatttataaacgattgccatatcttcagtgaagtctcttgtaggtagaaacaaagtattagaaaatagactttttttaaagattttattccaagaaaaagaagcatatttaggattaatcaatgttttcattgcatcataacgattaattttttcttttacgagagtatcattttgatatatatttgttacctttttttgaaacatagtaagttgaaatagaaaaacatctaaatctgtattaatcaaaaactgtactaatctctccaaaatatttgtcttaattaaatcatcactatcaataaaccatatccattttcctctactttttttaatccaaaatttcgagtagccgaaacgccactattttctttatcataacaaattatatgagaatatttttcactatatttctttataattttcaaagaggaatccgttgagccatcatttattaccaaaacttcaacttggcttaaatcacttgaaataatacttttcaaacaatcttcaagataatcttgtacattataaacaggaataataatacttaaaattggcttcttcataatattatgattacctttcttaacatttgttagctttttacattaactgtaacttaacacaatacgaaagacctttgatttaaaatcattctcccaatattgaattattataatttgctactgccatacttataaaaacaatagacatttctaaatatccatctattccacttgccataagaaactgtaaaaatagtatactcattaacaaataagcataaaatgattctctagctaagcgataataacatattaccactattataattcctaaaattcctaattccattagaattttaattaaatctaattccaatgttgttccattgaaaaagaagttattctgtaaaaatttagtagtagaagttaatccactagacaaataattattttgaattaaataccacactctataagctctactcatagaaaaatctactatatcaaaatgaaatctatctatttcccaattataatttaatggatttaataaaaacatatacaattctattaataaaatccacattaaagaactaatatataaaatccattttttgatttttacctttctaaagaaatttgtcgatgctattaacagtattaatactcctaaaatatagacacgtttaaagattaaaaataccattatcatagatgctatggtccagcctggaaatttatctctataataaatgaaaaaagaagctaaagtaaaagacaaaaatgatattttagaattttcaaacggagaatatgaatttgaaaaagaaattgaaaatatatcttttaatgttatggtggaaaaatctgtactaataaaaaaagcaactatagataatagtaatccaaatttcataaacatttcaatatcatgcatagataaaaaatttataaatataaaagcgtacaaaaaaggtacaaaaagtcttattgcttcacctggaaaaaaattaaaattagcatctacttgatatgctttaacatttgaaatgactataaaactaataaataaaaatattcccgttttcaactctgaagtatatttcattttatttttattgaataaacattgacataacggaataattcctacagcaattggaagcagcataaaaatgtaaacaatcaatgtattagcatcacttattacattaatataatctaagaaatttccgattaaagtaataaaaaaagatgtgagtaacaggattcttgttttaagatcaactttcatttcttcatatcctctatcattcagtctgttcatcacagtattcaacaaattcttcgtaagaagaaaactgataatttttatacagtaattgtttacttaactcataattatccattaacttcatctgcgctttaaattttgtattcaagtgtgtaggtttaaataaaaagaaatattcgtttaatttttcttcaggagggacttttccaaatctctttttatattctcttacaaaagtagcagcttccttaagttgattgcattttctcttgttgtaatattcatcaagtgtcattaattttctagctggatttccagcataaacagaatctgaatctacttttccagaaactacactattagcacctataatgacgttatttccaatatctgttccccctaatatagttgctccccagccaataaatacattatttccgattacagttttacgttgacttccgtaaatatatccatactttcttttgatcacgctccaactataatcgtgattaagaatagttgcaggtcctgttatttgaacgtaatctcctatcgatagtaaatgcggtgcttgtacatcaatagtagtattaaatggtctataaatttttacgcctttacctataaacacacctatttttctcaaatgtgctatataactatcactagtagccctataccctaatactttgactttaatccaatttttcacattcatttttctagtcctaatttaaagattaatagtaatattaaagccattcgtttttgtatcaatttcaaaaaaatacgttgttttttatccagtttatcaataggataactttgaatagcttcttttaacatcgagtttttgcaaatttttcttatagtatttaaacctttataaaatccattatttttttcttgtgatatgctcgatcttacattaataaaaaactgctttttcagcctattaatcgaatcttcggataaattattttgttttacttttttaagcaaatacgaatacaaaacaacatataattcaaatttattaggccaatatttatgtgacagtgagtctggattaaacctataataatactcagcagaagaaactatttttaccgattcggaatattgaaagtaatctaagtcccatacaatatcttcagatatatactttctttcagaaacgaaatgcaacttgtttcttttaattaattctagagaatataaattattccacacggacattttgatactatcatttttcttaggtgaatttcccaacattttttccataacattttcttttacttctttgccaaagaaagagttaggtttataatttttcctcaaacttatttttccagtatcatcgattcgagtataaccgccaatcacagtatcatattttccttgaattaagggtgcaatcaatttttttaaacacataggacctaaaaaatcgtcactatctacgaacataacatattctccacttgcatgttccataccataatttctcgttaatcctaatccactattatttttatgaaacacacggatataactatacttttcagaatatttatcacatataattccactgttatctgtagagccatcatcaatcagtataacctcaaaatttttatatttttgattaacaattgaatcaatacattgctctaaaaacttttcaacattatatactggtacaattattgatataaaaggagtcttttctttcatttttacgatattattcataatctacaagctatttattaaatgatttatatctatatatttattttttccaaatggttcataagatgctcttatgaatttatggtttttgggagcctttatttttattacatttggaaaatgaccaaatttatcgttaactgtaaaacaaattttatttctcatgggtaaatttacaaagttcctaatatcttcttctgtacagccattttgatcattgaatttatataatatatgatcccactttattctttttattcttctattccatttttctaaaacttgctttttagaagaataatgcataaagaaaatttctatatcgtccaatcttgcaaccggatatgtaccataaccaggggttaactttagtttctcataatagttagattccttaggatcaataaattttaaaggctgatttaaatattgttggagattagaaataaacttaatataatcagatgcccacaaaaataaaccgaccgtaggagattgcttaattaaattataactttcataaacttctcctccccaacaattattagatataattgtaaacttttgcttatttatttttttttgacgatacttcgcaaaaaactttcttcgaaattctaaaacttttaatcgtattccttctattgtcataacattttcctataaaaatttagtactttacaaacattcttataattatcgtatcctctattcttaagaatacttgaatatttcaaagaacactcatatctgtctaataccgtaacttcttttatagcatttacccatgcatctatgttagttaaatcaacatatatattattttcacatagatcggtttcaacagataccctatccgaaacaatattttttaaacctgatgcagaagactctattaacacaaaaggttgcccttcaaatcttgacggtaaaaggaaaagatccattgcagataaataatctgatacattagtaacatttccagtgaatattattctatctttcaaattatatttgtctacttctgcctttatattccctaaatcatcaccttcacctataaatattaatttataatcattaggcaatctttttaacacatgaactaagaaaatctgatttttttgataattaaaataccctacatgtcctaataatttttgattagattttatacccaatttttctctaatttttttacgctgttcaagagaatacttatatttatctagatcaatcccattccttataactgtaaatttttttcttttaaataaccattgccccgccgcatcgttacatgctaatcttccattaacactgtattcaaatatgggacgtaataatttattaaccaagagatgctcagtagttgtattatgactatgtgctatccttaacttcactcctgctaacttagcggcaagcaattcaatagccattgtggtactatttccatttacatgaaccacatcaaatttttcataagaaagatattttcttaattttataaaatagtttattagattagaacttcttccatttatttcttttaaatgaacaccattattttttaattttttcattaagttactctcaacttcattaggtgtaaggatagtaacatcaaaatttttctttactaactgctttgccacattaatgataaacgttgatatgccattggcttcgagattaacagtattaatcagtaaaattttcattctttcaccaaattgttcacaattttctctactttttcattaaaatttttattattactgctttcaccactattttttgtcatagcaatttgatcataattatcaacagcttgctttaaatcatcaatattataaacaggaatgatattattcattctttctacaattaatttaacaaaatcaacctgatgattattaacatgctcatgaaacttttcttgtctgggtactactattggtactttgccaaattgcaaagcttcaataaagcttgacggaccaccatgagtaattacaattcgagcatcttttaaattttgctgcatttcatcaaaagacatcattttatgcgcttcacaatgcttgggcttatatgtactaaaaccagtttgcatgacgactttttcttgaattgcgccatctgcaactaaatcatcaactttttttattagtcgattaaatggctgctcatgtgttcctacagttacaaatatcataactaaaaaatgctccctagattaattgccttaggataaattttcttcatttcttcccattgcactatgaatttatcggtaattgggtaaactaatttgcctgttacagtcggtttatcataccgatcaaatacttcaatatagactgttttagcccccatcaatttaccaatataaaaaaacggaaccgctactgcagccccacttgaaataattagatcaggtttttctttatggagtactttaatagctaaaaaagtgttttttaataaattcccggatttaaaattgaagtgcaacactaagtgttaaacaaaaaggccatgaagacctaaacttgaagtgacgaaaaatcaagaaaggaagatctttatgaccaattcaaattctagcatttctaagcactatcatcaattaaccagcgtacaacgtggacaaattcaagcaatgctggattccggcataacttcccgtactgttatcgctcaagaagtcggctgccataagtcgacaatcagtcgcgaaatcaaacgcggaagtgtcctgcaaagagacagcagctatttattgtatgagcactattacgctgatactgcacagatttattatgagaagcgtcgcaaaaactgctatcagcgcaatccattgaagcattatgctgtctttttgagaatgctctccagacgctttaaagctaaatttgatgccaccagcatcgatgagttcgttggtgaattcaaaaggactatgccaggctacccttgtcccagcacaccaaccgtctatcgctatattgatcagggcttgctggacataagcaatattgatctgcctatgaagctcaaaagacgcaggaacaagcgtcatcacagccatggcggtcacgctttgcacaagaagcatcttggcaattccattgaacagcgtcctaaagagattgaagacagaaaagctccgctgcactgggaaggagatctggttaaaggcgtcagacgcaagaatcagcctgctttaatgactttgactgaaagaaccacacgctttgaagtagttatcaagattcctgactatcgggcaagcacatgccaaaggctgcttcaaaaggagattgacagacatcctgcctggtttaaatcaatcacgtttgacaatggctctgagtttgcggatatgaccaagatcaagggctgccagatttactttgctcacccatattctccatgggaaaggggcaccaatgagaactgcaatggtcttttgcgtcaattcttccctaagggcaagagcatgaaagacaagtcaaaagcttatgttcaacaggcaactgatgccattaaccacaaatatcgccgaatcctccaatatcacacagcagaggaactcttcaagcaatatatctcttcataacctaactgttgcacttaatttgacaattcaggtttttaataaattttttagattccggttagtaggataataacatccatacatctttttacccttaagtttgcttcgagcgtcttctttatcaaaagttacccaaaatctagttttattctgccaaaaaggtttcaacatgtataaatgtgtcaagtgaccaccactcgagccaactaaacaaactttcatctagcttttctcctatcaaatctcatctaatttattcatttgatcatcaaaattaatattttcttttaatacattagtttcaatcttatttcttagtctataatttacatacatttcttcaatactactagccaaactatcttcatcaaaattggcaattaacccattccacctatcctttatttgttctctaaacacaactaaatttgaaactatgatcggcttatctaatatccttgcttccaatacagataaaccgtatccctcatgccttgaaaactgaacatataaatcacaattttttatgtatggatatggattatccctacgtcctagtaaaaagaaattattattcaaatttagctttcgtattaagctctccaatttttgtctatctttgccctcacctatagcaaaccacttaaactgtatacctttatcttttaatattcttgcagcttttattgaaacatcatatcccttttgttcagttagtcttccaactgttacaatattaaagacattccttgtaaactcttcaggatagaactctgtagatttttttaaaacattttttacatctattacgttgtaaaaaacgtctgatttttctttatatttaggatacatatcgttaaatgtatcttttatagctttagatacaccaaatattctgtcataattaccaaaatattgttctacatttcttatccacggcatccgctcatcatgaagccaaacagcctttttacgtgccctaacgttcaatgccaaaaaagctgttgtaaatgcaccataaccataaaaatcaattgcaatatcataatatggtagagaaggcatcctactatgctcagctaataaattataaatgggtaaatatttattaagtttgattttttttatgatttttccaggtaaagcatacattgaagctaatgaacgataaaaattattatcaaactttatatactcaattttaatttctttctttaaacgataactatattctgtatcattatctaacaaaaggagagttacatcatatttacttctatccaaatgattcagaaactctataagagcaacttccgatccaccaccaccgagtgatttagcaactacaagaagttttttcataacttaatacgctccattaggatgaataaccaccccaattgtcttaataatcaacttcaaatcttcccagcagccggaatggttgatatacacaatatctagccaaaccatctcgtcgaagtctgcctcactacggcgtgttacctgccatagaccagtacaacctggcatcacaagcaaacgttgcttatcgtagtcagtgtactcagctacttcacttggcagtggtggacgaggaccaactaatgacatgtcaccaaccaaaacattccaaagttgtggcaattcatcaagactatacttacgaatcgtgtgtccaatcttggtgattctcggatcattcttgatcttgaacattgctccatcaacttcgttttcgtcttctagttgatctagcatttgatccgcattaaccaccattgaacggaacttccacatcttgaacggcttctcatctttaccgattcgttcttgagaataaaatgcaggactaccatcttcatgtcttatttttattatcaaaaataaaaataacggagatagtaaaatcaaccccaacgcactggctagtatatcgaataatcgcttaatcgtgtgatacactggtcgtccgttaacttttgcaggattaacttgtagtttctccattaccatcatattcctcttaccctctgtttgatttagtctatttgaatacactctcttattaatcttatcacgtttaacgcaacttagaagcaaacttgcatatttgcaccaagcattaaaataaccagaactttttcttctgctttaatgggtgccaatccatctgaactgggtcgccattgatgatacttctagcattatcttgccactgctgagctagatcttgactgaattcttgactcatctttttataagcttcactcaattgatactgccgtcttggcaagtcgtgtgcgtcgctggcaaaggtacatccctgccccgccgcaatcaacttgcgcgacatttcttcaatcttattgccaaaaatccccgtataagaactagcagtaatttgcactagacacccttgttccagcatcccttgcaaaacttctggttccttcaagatgcggctattacgctctgggtgcacaataatcggcgtaatcccgcgctgcatcaccttgaatatcgtgtcctgcgcataagttggcacgtcatcacttggaaattccaatagcatataagttccatcttcatcgcagaacaagatgtcatcattatcaagcgcatcaattaagtcacccgacaagcgaacttcctgccctgggaaaaccgtcaacggcaccttggcctcatctagcttctgttggtagagatcagtcagccagatgatgtcatccttatgattagtgtaacgaccgtttagcgtatgtggcgtacagattgcatgcgtcacgccgtctttgacagctgcgttagctaatctaattgatgttgaccaatcctttgagccatcatcaatgccaggcaagatgtggcagtgaatatcgactaaaaccattattgatcgtcactcttttttctaccgaacaggccctttttcttctcagcgccatatccataaccatagccatacccgtagccgtaaccatagccaccgttttcagctctaatgtcgttcatgacgtagcctagaatccgagccttggcaaattttaacatttgcactgctctagtaatcccagccttttgcgtaacgccttgacgtactactaagactacgccgtcaaggtgactagccaactcttgcgtatcggatacttcaagaacaggagctaagtcaatgataaccatatcataatgtgacttaaccaattcaatgaaggtttccattctgcgtgaaccaatcaattcagctgggtttggtggaatcggaccagaagtcaagattgacaagttatcaattccactttcttcaaccacatcatttaaattgatttcgtcagcttctgaagtaagaacagttgtcaaaccagtattgttcttaacgttgaacgtactgtgcaaagttggacgacgcaagtcaccatcgattaacaaggtcttgcgacctgcttgtgcataggtgatcgctacgttggccgtaacggttgacttaccttcactgatattagctgaagtaaaagctaaggtactaatttcttcatcaactgccataaagttaatgttagtccggatagttctgaattgttcagataccgcactacgaggatcagcaactgtgattaatttggcaccatgcttaattgtatcgtcggtaccacgcttttttctaaataatgccatttacttctcctctcctatactcgacgacttctacgcttagggccattagaattcttattcttttttctaatgacaaatgatgatgacacatggaagtgtgaaacttgacctaagttaactaaacctaagttatcagtcaagaatgcatcatccttaactgtagtgtcggacatttcacgaattaagactactgcgaaacttaaaaccaagccaataacaaagccagccaaggtaaagagtttcacattaggtgatgattgattaccatcagttgctggcgcaacgatcgtaacgttgttaatgttcatgatgttaggaatttgatctctgaatgaacgcgctacagcgttagcttcaacctttgccttttcaagtgtatctgcagtagcagaaattgagaagacctgtgattgttgttgagtattaactgaaacgctcttggctaattcgctagtagaaacgctgtaactcttaccgctacgttcaactacttctggttgagcctttcttactaatactcggcgaccctctgcattagtcttgtacttagcaggtttagcctttttaaccactctaactgggttagctaaacgattagaagcatcttgcaaaataacgtgactagtcacgatatccttataggtagtaaccatttgcatgttagcttgttgcgtattgtatgccgcattcgggtcattcttattagccttttggttaaccaagatctgtgcattagaagtatactttggtgaaataataaaattagcgacgccccagccgactaaagccaaaccaacactccagataatcaatgcccagatgtggcgacggcaaatttgtagcaattgagtaagatcaattgtattttcagtttgcttttgctcttgttccatttaccttttcctttaataacgattaacgattcataatatagctggccttattagcagctaccttaacatgtggcaattctagcgctgttctgatcttatcagaaactcgttgacgctcatctttacttaccacttcaatttccattgtgccaaacttaggattctgagtttccttacttacaccctgagcatgatcttgagaaagattgttagtggcttttctataatccatagcaatcttgtacatttgattcatggtcaagtcagtttgcatctcactagaaatggaattcaagaaacttgaattaagcaaagttgaaggtgaaacagacttcttaagcaaggccatgattaccaaacggtcacgctcttgtctaccataatcctgacgagggtcaccatgacgaagttgggcaaatgctaaagcctttttaccattcatgtgataagtctggcctttgacaaagctataacccatattgttgaaagttaatggagaagttacatcaatccccccaacttggtcaattgccttcttcaaaccacccatattgatcatgatgtagccgtcaattggaacactgtaatatttatcaagtgtcttaatagtttcactaactccacccaatgtataagctgagttgatcttggttacaccatattgtgggtaatctgggaagattgcatttgagtcacgtggaattgaaacaatgcttgtactattagtcttagggttgattgacatcatcatgatggtatcagttctacccttccagtgacgacccatggcaccagtatctgtacccaataacaggatattaattggctttttctcattcagtaaattatcaagagtacgtcctttattactcttggtagtcttagcaacgggagtgtacatgttttgcgtcgtatcacgcaaattcttatagatcatcccgcaaacaaaaagaccgactacaatgatcacgccaataacaatccaaaaaccgcgccagaacttacggtgacgacggtggtgatgatggcgatgacgatgtatcggtttattacttgattctgcgttattttccattttaatcctcttaatcttataatcgttacttaaacttcccacacgcagaatcgctccttttattgtgattctgcgttttttaacaaatataaaaggcacatgaccttttcattgctataattaaagtgaccaaacgataattctatgcatgaaaggcttgtgccaatgtctattttaccatctcctgaccaaaaaaatgaacaactattttcaaactcaatcatcagcttcatcaagaagtttcaggtgatcaagctgttgagaaaatgtggcttccgcaaggaaaaaggcattagcctgttcagcttgtttctttacgttttaagcaatgtctttcgtgaccgcagcttatatatgcagctgaaaacggatcattttaaagaaagcttttctaaaaattcttattaccgatttatgcgcaacgtccacgtcaattggctccacttcaccacactgctttctgcgcaaatcattaataatcacttgcgatctttgacttcagaaaaacgggctgattgctttgttgtcgatgattcctacttctctaggaccggcttcaagaaaacagaattagtcgccaaagtttttgaccatgtatcaatgacttacaagaaaggttttcgcatgatgaccctgggctggactgatggagcttctttcatgccaatcaattcggtgttgctgtcctctcacaagctacagaatatgattggcgaaaacaaagtctgtgatcagcgcaccattgctggcaaaagacgcatgcttgcccggactaaaggcacagacgtgatggttaatttaatcgaccaagctatgaaagcaggtcatcaagccaagtacgtgctgtttgacagctggttctcaaatccacatcaaatcgtccagctcaagcaaaggaagctggatgtaattgccatggttaaagttagctccaaaatcaaatatgaatttgaaggagaacgcaaaaacatcaaacagatttatcgtagctgtaaaaagcgacgcgggcgttcgcgctatctgttgtcaattccagtcaaggttggccgccaagacaaagacggtgctaaaattgacgctcggataatttgcgttagaaaccgtgccaatcgtaaagagtggctggctattatttgtaccgacatgtcgcttagcgaagatgaagtcattcgcaattatggcaaacgctgggatattgaagtttttttcaaaacctgcaaaagctacctaaaactaagcacggaatatcatggtctgtcctacgatgccttgactgctcatgtggctatagtctttacccgctatatgctcatgtcagtagccaagcgggacgacgaagatgagcgaaccttaggtgagcttttctattgcatgattgatgagctggcggatattacattcagtcattcacttcagctaatcacaaaagcaatggtggctagcgttgaaaaagtctttcatgccagtgaagcacaaatagcagaattcacggctgactttatcaatcgtttacccaaatacatgcaaaaattgttaaagaaaactagcaaaaatagtatagaagcccaaagctaagcaatatcaaagaattgccagcttatttgatgtgggaagtttaagtcgttactattatatactcaagaacccattttgaccacccttacatgcggcaaatacttgaggtgatgtgcgttttattgctactgaaataatatattatcggtagatacgtaacatgcaaataaaaaatgcatccctcgaaaaatggaatgcattgctgctagattgagtttaaacggaattatttttcatcttactatcgccttgccttaaattgtactcacactgtaccatatttagtaagacctaaataaccaaaaagtattaagaagtacattaaatagaagttgaatagcatgttaagtattgaagaatcaatcaaagaatttgaaacatattttcagggtaaaccaaatgaagttgaagtagtatcacgaactataaaacaaaaaagtagacggccacataaaccgcctactttatcctaattgttatgatgatcacttgagttagttaaatcatcatttttagttagatcatctatatttccaactactccaccaaatagtgtaaacacacctattccaccaaaaatactaccagccaccgaatgcctttgcatcaccaaaaaagcagaaatacaaatacatagaattgttactattgatactactatcagagatgtccatgcgagccaacctcttcttttttgacgagcaacttctaatctccgtctatgcctactttcttcaacaccattattaattatttccttagcagcattcggatacaatttttggtatccctcaagaatatcaggaagcggaattggtccactatacatctcaagataagccattatttcttttttggtttctttaggcatctcagatttttgaatttgatcaagaatctgttcatctagcgaatctttatctgactttttctttatatcattttctagctttttacttggcttttgatctgccataagatattattccctttcttaagtcgtcccctatcctttgccaatcactggcaatagctttttcctcagcattactattactagaatatatcaacttgtttaataatttgacataaggcatagctacatttttcgataattttttaaacactaattgaatatcggtaaacataattctcacctcattcataatctctttctttattaaaagtatacttaaaatttgactcgtggtaaagattattcttctacatgcaatccacttctttccttattataagcatctgtaatacaataaacttaacagcaaataacgaggtgtttttatgattgataatcaacctaaaaagacaaaagcttatatcgcgggcgtaaacttaaacgaccaaaacttcgactactacatgaccgagctggccaacttgactgaagccaacaacatggaagtagttgggcaaagctttcaaaatgcagaatcaattgtcgccggaacttacttcggtgtcggcaaaatcaatgaaattagaactatggctcaaggcttaaaagcaaaagttttagtccttaatgacgaattgactcccgtacaaattcgcaacttaggaaaattaaccaaaatgcgagttattgaccgcacggaattaattctggaaatttttgccagccgcgctcgaactaaacaagctaaattacaagtgcaactggcacgtttacaatatgaattgccgcgtctacatccctccgagaacaacttggaccagcagcgtggtggtggcttagctaaccgtggtgccggtgaaagtaaactagaattgaaccggcggacaattggcaagcaaatttcggctatcaagaaggaattgaaggctgttgccggccaggaagaaatcaaagcggcacgacgcaaccaaagtcgcatccctaaagtcgctctcgttggctacaccaatgccggtaaatcaaccacaatgaacggactattgcgtgaattttctaaagaaggagcctacaaggaagtcttcgttaaaaacatgctttttgctacgctagatacttccgtgcggcggatcgacttgaaagacaactttagcttcattctgtctgacactgtcggtttcatttctaaactgccccacaacttggttgaatccttcaaggctaccctgcaagaaacacgtgatgctgatttattaatcaacgttgttgacgcctctgacccgaacatggtccaaatgattcggacaacacagaacgttttggatgaaattggcgttaaggaaattccgatgattaccgcctacaacaaggctgataagactgatcgcaattacccacagatcgaaggcgacgacattctttattccgccatcgatccaaaatcgatcaaactactggccaacttgatcaccaagcgcgtttttgccaactataaaaagtttgacttgatcctgccactaagcgcaggcaaggaactggcttacctgcatgatcgcgcccaagttttacgtgaagactaccaagacgatggcgtccacatcgaagcgaacatcgcgcccgacgaccaaggacgctttcgtcaatatttggcctaactcgattaggaaaaaatatgaaaaaacataatctgctgttcctttttgccctcacatttttgttagttcctactaacacgcctgtaatggctgctaaatatagtgctagtgagtcaaaaaaggtgcgcacttttcaaaaaagctatcatcgtttgagccagaagaattacaatcagactacgctctttaccgtgcagccaaattttggtattcctttttcagcaggagtgcttgaccctgattacatcaaaacttcaatggcttatgtcaattattaccgctcattggttggactgcctgatgacgctaactatgctaatgataacgttaacgcacaacttggtgctgcagcgctagcttcagttaacgcggagcaaaatctgcgagctcacggcttacaaggttacgtcaagcctggctatatcagtgatactgactgggacacagcggaaaataccacattgggcaatatcaatttttcagaatcaactagcggaaccacggctggcgagatcgttaccgatctgatacgtgaagataataatattgcaggtaatggcaacatcggtcaccgcggcatgatcctctcgacgcgagccacccgaatgggaattggtgctgcttatggcactgaaaataatgtcttgtattctgttgaacatggactatttgctgatgatattttgcgtcagcctgtgaaaagccgaatcgtttatccagctgccggcgtttttccttacgaattagttggtggtaaaacgccatggtcttactcaacaaccgagcgaatttctggtcagccgaaaatttacatcacggatttgaccaccaagaaaaagcggcaagcgacgcaggtgcgcaacttcggcactgctctttatggtgacggctacacaacgacaatcacttaccgacctggcaaaaccaagttgatcagcacgcacaagtaccgtgtgcaaatcggcaaacattatagctacagtttcaaatttttcaggcaaaatagcacattgaaaaataaacagattgtaaagcatcgaaaatgaaatacgttgatatgcaaaacggctcaagcagttgtacatcctgcttgagccgttttagatagtaacaaatattgtagtctgttcaacaatcttcatgtaaaataatactcaggtctattgcagcggttagctaccgctaagacttagtaattttagcatggctacacacccctcaagattttttaagttacggaggtggaagcatgcataattgggtagactggagaagtaggcttacaaatgattgcttgggctattgcgtatgcgataacaaaaaaagctaatcacaatgattagccgaaacaacagtcatcttaagttacgattggagttagcgaccgacactcgctagctccttttcttttattattttaatatgatttagaatttattgcaatgtttagaagcgcttattctacgccaatgacgtaacgcatgatgaatcaatagcttgttataccaagcataattgtgcttcatataattataggcggttgtaaaattttccagttggctagccgcaatgaattgattgcgtgtccaatgccaatcctgagtaggataatataaaattttcactcggattacccttcctactgtaataattgcccgatcatgatgataacgcgtgcgagcaacattgaggtagctaccaattaaagtattgcgccagtatcgattatgcagataatttttctcccaaagcaaggccctgcgcaataccttagaaatgcagtaccattcgcgtttgccgttaggcaattcaaccaaacaccaaagatattggtgtctcttcgccattcaatccaccccttctaattaatatcggctttaattataccgctactagctattcagttagaaaatcaataatgtcagaaaatattaggtcatgatgtcaaatctattcaactgacatcatttgtcctaagaacgcatttaccgcttgcttaatatactcgctgcaaaggtgagtatactgcgttgaatttctggacatggctctgcttaaacggtcttgatgggtgtcattttaatcccttctttaatttttcagtctagagaaaacttttatcaatacaaaaaagcaagcgcattaatcgcctgcctaaaagtattccaaattacttctctatagcactctcttagcaatcgatggtgtaaagtaactcgataccgtttgcaaaatagtaccttgctccggtgttgctgcgtttacatattgattgtttcctacataaattgcaacgtggtatggagctgtcgttgaaccccagaagactaagtcacctggctgcaagttgttcaatgaaacagtttgaccaaccttaacttgatcataagttgttcttggcaagttaacaccagccgctttttggtaaacatattgtactaagccagaacagtcaaatgaatccggaccttctgcaccccagacataattcttacctatctgttgtttagctagcgcaacaattgaagcggccttactagtagcttgcgttgaagaagtttggttagtattttggctagtcttcttgattgccgtattaacaatttgcttagccttcttcaccttagctatcttttcagccttcttctgagtagccgttttagtagctactgccgctgtcttcttattaacagtagtctttgtctgcttagcttccgttttcttaacagttggtgcttgcgatacttctgctttttctccagcagtaacatctacggtataacgcgcttcaatccattcacgcgttccaaccttgtaccacaagttgcccttcttatcgagtgcagtctcagctacattccagaccgtgccgtccttagcacggtagcccatgaattgaccattctcatagttggtccaaatattcaggctcttacctggtaaatagctaatcttaacttgcttaatcgcagtaaaattagctgcacgaacagttttcattgatgtgattgcggaaacacccgtaacggtcagggctgcagccgctcccactttaaaaaaattatgtttcataattgaatccccttggtagcgaaacaggtgaaaacttttcacctaaaattacccactcttactatgtaacgccttcattattgcatgtcctacctcaagaagcaaattagaacattacaatattacaaaaaagacggatcactggaatccgtcttcattacttactatcttaatttaaaacacgcttagcaacacttgggtagaagtatgaactcaaagtttgcttgattacgccttgacctggtgtagcagcgtggatgtattggttgttaccaacatagatacctacgtgatatggagcacttgcactaccccagaaaagcaaatcacccggttgaagattatccatagaaacggttgatccttgcttaacttgatcataagtagttctacccaacttcacgccagcagcgttagagtaaacatattgtaccaaacctgaacagtcaaaaccgttagttcctgtaccaccccaaacataggacttgcctaattgtgctgaagccaaagtaataactgctgaagcatcaccagttgcttgaactgacttcttagcctttttagctttcttaactgcttgagccttatctgaactagcatcaacagtatattgagctaaaatccattggttatcaccaatttggtaccatgtacggcccttcttatcagtcttggtgtcaaaaacattccaagtagtaccatgttgagcacgttgaccagtaaagtggccaccattgtagttgtcccatatgttaattccataacctgcaatgtagttaatctttactttggtagtagcagcttgaacagtagcattagttgaatctggcttgatgacatttactgcagctacaccggtcagagttaatgcagcagctgcggtaacttttacgaaattgctcttaatattcatcaaattctcctatatgttttcactatatatataagcattcttagaatttattacttaagctggtaacgaaaatattaattcatcgaaaaatctttaaatttctttaacgtatttaacaaaatctataataatgtcctaatgttacagtagtgttacaaaagcaatactgatttaataaatattacgtttccgtcaaaaagaaaaatagctagggagatttccctaactatcttaattagatattttatttttaggaagactaacgcaattagtcgattacacgcttagctgatgatgggtaaaatgaagctaaggtttgttgcttaacattttgaccaggagctggagcgtgaacaaacttgccgttacctacgtagatacctacatggtagttaccccagaataataagtcacccttcttaagcttcttagttgaaactgaaatggtcttaccaagagtaatttgaccgtaagtagttcttggcaaagtcttgttaatagcattcttgaaaacgtaagtagttaagcctgagcagtcaaaaccgctaggaccagcagcaccgtaaatgtaaggcttgccgatttgcttcttaacaagcttaacaaccgcattacgctccttagtagtagctgattccttcttaactgaacttgaatcaggattggtagtttcaagatctgaaattgagttgttagtattgatagtagtgcttgaaacatcatcagcgtgaacagctggaacattgatcattgaaataccggcaaagaatactgataaagctgcggtgtattttactaaagtacgtctaaaattcaaaattaattgtctcctctaaaaattactaaatttgtttttgatttcttaaatcagttgacggtttatataataccgactgaatgttacacgaatgtttcaaaagagctaccatcgcgttaagaaacatgttaaaaaaacagattttatgtaaaaaaaggagaagcaaaatgctagcgaagctttgctacaagggcatcgagcgcgtttttagtttctgttaaattgtcgttaactaagatatgagcgtattgcttcaaatcttcaggtaaagcatttaattcactgccgctaagtctttctttaatcttggctggatcatcgccccgctttaaaaggcgctgttttaactcttctttagtagaagttgtaacataaagaaaataagccttgtcacctagctgtttaatgtaggaataaatgcccttgatatcgacaattaatgaaaccagatcacttttttgccaggccagattcaaagcttctcgacttgagccatattgataagagccgtacttaatatgctcaaaaaagtgcagctgtgcaaaagtttcgtctgtttcaaaatgatatgacacatcttgtttttcgcctgatcgcatcggccgcgtggtatgcgttaatacgcgtggaataccatatttttcagttaaatattctgaaacagtcgtcttgccagcaccactaggtcctgcaataagaattatttttttcaaaacctgattctccccacttgaaaatgttgcttttttataatagcattcttgtgttataaaagactaagactttttctcggaaggaagatacacataatgaaaaaagcagacgtaaaagttggtgcaatcgttggtgccaagtcagaagaagaacttaagaagccattccaaggcaaagttgaaaagatctacgaaaattccgcattgcttgcaattacttcatacgatcccgttgacaccactgctatcagcgacttgaacaataagatcgtagttaacttcaagaatttaaagactgctcgcgctgccaagaacagcaagactgcttcaactaatgaagttaagattgaaaaaattgccaagaagaacgatgataaaaaagaagcagacaagaagtaaaatttgacaaaaatagcccgcgcaatgtttacgcgagctatttttttgcctaaaattaggacatcgatacgagaggaaatattttatgaaagaaaaaacgcgaactgttttattttggtttattttaatccagccctttttagacctttattggttctacaacggtaaattagcggaagttttaccatttactctacctacgattatccgaattttagctgtttttgtgattttctgtatgtttttcagtcaaaagcaaaattggcaaaaattagggcaagacaagtggttaattctatatttagccctactaattttgtattcgattattcacttaatccacgtcaaaaattttaacagcattaatcctaatgactacaattattcaaccgtaagcgaaattttttatctcattagagtgcttttacctctgatggtgatcttttttacaaaagaattgaatttcagtcaggagcaattcagacacgttatcgaaggcatcagcggacttttttcatttacaattgtcattaccaatctttttgtcatttcgcttagaagctacgagacaggcccgattagcgctaatatttttgaatggtttgttaaccccaatatcggttactcccatatggcctccaaaggcttcttcaattttgccaacatggtatcagccgtactctttatgctggtgcctctgatgctttacttcatgttcagtcgttttaactggaaaatcgtcactttgaacgtagttcaagctttagcgatgatcgagttaggaaccaaagtggccctcatcggtttaatcggtggcgtgattatcagtattttgctgtatgttttccacttatttattgttaaggatgttaacaaaaacggcaaagccattatcgtggcgcttttaatcgaagcgggcacctttgccatcatcccctttggtccagcaatccagcgctataattatgaaaaatatttggctcagcaatccgatgattctttgacacaggccaagcgagaattaaatgctggcttaaaaaaatatcctcaaggtaaacagcgcaaagaatttttaacgaatttcatcggcaatcattatcaagattacgccttaaataagaagtttgtttttaaaagctacccttataaatacgatcctgaattttggctcaaaatcatgaacgagccaggcaccgctagaatgcaaaaccgacatgtagaaaaagcaatgctcgatcaagttgtgaagactaacaacaatcggctcgacaagttcctgggcatttcttacacacgagaaaccaacattttcaaccttgaacgtgatttcactagtcaaatttattcacttggttggatcggcatgctgttgttcattgggccttatgtcattatcctgctctacgctttaattaagtggctaatgaacaaagaaaagcggacttatttgatcagctcaatgttgctttcaatcgcctttatgattttcgcagcattctcgtcaggtaacgtaatggacttcttaacagctagcttcatcctggctttcgttgaaggcagcttgttagctagcgtaaccagaaaagaaaattaaacataaaaaaaagttaggtagttgcttgcctaactttttcttagtttttaaacattatttttcttgcttaataaagcttgaatctggcacccgaattaagtagtaccgagttgctaaatgacctgcatgcatcccgattccattttgccaattccgcttgtacttagccgtataaattgccacgtaagcacgttgatactttttatccattttagccaattccttttttacataaggaatcttctcggcattcacatcaagcgcagtgttaccataagcaatcgaggcataatcactaccaatcgtgaccttgctgccatcgcgataaaaagtataagtttgtgagccatatctctttttagcagaattaattgttacatagcttgaatttcccgcacctgtacgcattatcagtggctcatacttcacgcttgaagtaatgcggtttgcatcttccaggtctggattgtccataaaagtctgattaaacatccaacctgcagctaataaaagtactacaatttccacaatattaagagccatattcggccaactaaagcgtttatgctgtttgataatcatcttaatccgtctttgacggatgttctggacgatgaaaactaaataaagaatgatggcaacccaaatcaggatcccaatgatattccagctgaacatatctcgccctgctatataaaacatagaaacatgcagaagttttcatatttctacatgtcagaaagaaatatattttcctttctttgtcttatttactgctgtcttcatcagtattccgatattccatctggggagtaatcgcattgactaactcttgcagcttaagggcttagccagcccattgtttttattttgttaacgctagtaaatttaatactgcattgtcatcacgatcattgctatagccacattcataacaaatgtattcattatgcttggtgccatgttttttattgccctgcagagtaattttgtctgcaccagttttgacatagccacaattggcacatctttgtgttgatggatatgttttatcagctagaattaattctttgccataccattcacacttgtaagtcaagacttgtctaaacttgccaaatagtgacctttgcatgcctttggaggctacatgggtcatcatcatttgtttgacattcaagtcttcaatgacgatttggtcataattgtttacaagctcagtggtaaatttttgcaaaagatcattctgaatattggctgctttgcgataatcacgctgaagcttggttctcacttgcaggtaattattgctttggcttgccgatttaccgttaactcttctctttttagacaatactctttgataatgcttgattcgcttgtacagtttctgtagttttgctggcaaaacattaatcttgccttcagtgtagttgaaatgcccaacgttgacatcgatggcggtctttttgccagttttagcctttagtccagcctcttcttcataggaaagggcagcgtaataatgtcctctttctctaaagatgctggcaattttaacctcttccatctttaatgcctcgtatgctggaatatcaaaccaagatttaatccctctaggcttatctaatctaagcttgccattaattatcttggcgcgatcagttttaaagccttgacgtggagctttcttagatttgaaatgcggcttgccccaatcaggctgggtcttgtcaaagaagttcttccaagcattagccagatccttgactgctaattgcagacagcgagcagacaaagcaaattgccaatcagccttgttattgactaattcatcccgcactcgatgctcattaggactaggattattatccttgtctaaagtccgagcttcatacatgtcttgccaggttgctaaagctagattccagcagtatctgcgatagttacaaagacgttcaagttctctttgcattatcttatttggccttaattcgactacctgagttttgatcatttgtttcacctccaatgcaaacataagtttagcaaaggatgtaacaaaaacaagcgaacaaaatattaaatttttagcagcagttaatttgcttctatgttttgcctttctgaacaaattacctgtatctttttctatattgccattaaattctatatttcagctaaccatttaatcctcctttttttcaattatatggtaaaaaaagcaaaatttgaataggataataattgaatacttagttaaatagtgagaagatcttactagtacattagatttattagggaatattatggtagcaatagctttttattcaattactgggcaaacggaacgttttattaagaaaactcaactttcggcccatcaaatcgacgatgccaaccctaagtatgatatgggaaaatcttatatcttaatcgtaccctcatatcaggacttcatgatggattcagtcgttgattttttaacgtataaagataacaaaaaaaatattatagggattatcggttgtggcaaccgaaactttaacgacctctttgctcaaactgccaaaaagatcacggcaacattgaaagtgcctattttgtatcttttggaatttagtggtactaaccaagatgtcaaaaatgtacgaaaaatcgtacacgatctttctgctggtgagagtactaagcaagtccaaaagcctaaggaattacgtgggaatatcagctttttgagtgattttagagattaaatatgactgaaaaatattacaaagcaattaactggaatgacatggaggaccgggttgacaaatctgcttggtcccgcctgaatgatattatctgggaaccccgtaatgttccagttagagaagataaaaaagaatttttacaattagacaagccggtgcaagatgccttgcttcacgcattcggagcactatctttttcatctggactccaaatgaaaaatgggctagagcaaattaaggtagatgccatcacaccagaggaagcagctgtgctgaatgccttgcaatatttggaatctattgccaataaaggctacagctacgttatcaacgagttgacggactcaaatatagcaaaagacgttattaactgggctgatgacaatccttacctgcaaaagaagattcggattttgaataaaatctaccaaggcggggatgcactacaaaagaaggtagctaacgttatcctagagacagctctctatcattctgccttctacgctccgctttatttattcggacaaggcaaaatggtacgaacagctgaaattgttaagttagctttacgtggcacttcatttagtgggatttatcctggttacaagttccgcttaggctaccaaaaattaggtaaaactgagcaagcagagctaaaagaatggatcgataacttgtacgatgtgctaattgataatgagaagaagcacattgagttaatgtacaagggcactgactggatcgatgatgttacgcactatctctactacagtgtcaacaaggcctacctcaacctaggtttttcagccaagtatcctgacacttctgattcaatcaaccctattattgaaaaaggggtcatcaagaatgcagtgcttgaagacttcttcttctacactaacgatcactcgctgactaagtttaaagaaattaaataattacaaaagacgcaatcgaaaattcggttgcgtctttttttacttcttagtagttttcttggttgcctttttagtagcggttttcttttctgcttcctttttttcaggcttcttatattcacgtattgtggttagcttttcaataattgcctccaccagttgatcaacaatcttcgctggatcttgttcgatctctacttcactggctaattgatcaattctaaagcctgaaacattaacgtattcagagcgcgtttcaaagtaaacatttaaaggatattccttaccctcttcaaagaagttagcaactcgtttgtaattgctataaggcaaattgataatatttgtctccaaggcaaaagtagccggccgctgacccgtcactgctagttgcgtttggatcaatgaattatgcttaaaagcagcgataacttccttgaccatcttttcagcatacggcttgattttgctcttcgacttgctaatgtcggcatatttaactgtttcaagatcttgaatataatcttgattttcaattttttcgttgagatcttttaaattaatttccaaaataaactttcctttttcattggttataattacaaaatactacaaaaaaattttttgtcatcctttttaaggattcaattcagtatttttagctttttatttgttaaaatgacactatgaaaaagcaaaaatttgatcttaagtatttatttttactcattcccattacgttaattctcattataggattgatttacctttttaacaaaaataaaatcgataatgaaattaattggatgacaatgaaggaagaacagcggctcaatgtcccgctagaaaatcaactgcccgatctacccaacggctgcgaggttactagcctatcaatgttactgaattactatgacattaaggttaacaaatatgatctcgccgataatattgctcatgttgattctttcaccgacaacggtaaatatcgcggcaaccccaatcaaggctttgtcggccatatgtctgtcgctaatgctggctggtgcgtttatcatgggcctttatttgacgttgcacgtaaatataccagccacatagaagatgcctctggcagcaattttttagcgattctcaagttaatctccgatgggcatcccgtgctgatcattaccacaaccacttttaatcatgttaacaatatgcaaacatgggaaaccaatactggtaaagtcaacgttacaccgtcatcacatgcctgcgtgatcacgggatacaacaagcaaaagaagcttgtctatgttaataatccttacggtattaaaaaccaaccggttaattggcataacttagaattgagttatgaccaacaaggacgccaggcactttacatcaaataacaaaaaagggcaagccacgaaggcttgtccttttaactcaaggcacatgctcaaagcatatgtggacgtttaaactgttcacatcagtgcgtccaacatcagcacttcccgtgcttgccacttaaggcggatgtcctctatctcataaatatacgcatctcgcgttcattaatcgactcgtcagtcagtaattgtactattttttatgtttgatgtacagtctagcacttttaaaatgacgatatttaaatttataaaaaacttcagtacacatagtcgataacatgaaacctaaagcaatagcaccagtaacaattgctactcgtagaagcaaattctctccttgactataatcccccacaactaaagcacgtactgcttgataagcaggcacgcccgggactaacggtactaaggcaggaatattaaagaccgtcactggactttttttaatgcgtgcaaaacacaagcccaaaatacctatcaaaaaggcgccaattaaatttgaaatcattcgcccaaatcccaaattaaagcaagtccaatatgccatccagcccactgtgccactgactcctgacaggtgaagatcgcgatgcggtacattaatagttaatgcaaaacccaccgaagctacataagaaaaaatgacattaataataatttctaaccaaagtggcatttttatactcctatgaatttaagtacaagtgcaactccaccgcctaaagctaaagcggttaacacagcctcgcacattcgcgtaatccctgataataaatctcccatgaatagatctcgcaaagcattagtaattgccaagcctgggactaaagtcatcagagcgccgatcaaaatattatcagtaatcatttgtggattaaaatgattgaataatactgccaagatccccatgaccattgctgcaattagctctgataaaaaacgaatcttagtatattttttaaactcataatacgaccaaaaaccaacagcccctactaaggcagcacctgggaaatcaacccagtcgtaattatccataaacaaaaccatcaaggtagcagacaatacagcagctcccaatacctggagccacattgggaaagtaggtgcttgtgatactaaagcaatcttttcttttaattcagaaagagtgatttttttaactgcaaattggcgcgacaagtcattaacccggtctactaattccaaattgatgttgcgatcacgaatttgtttcatctgacttagcttgccaccatctaagctcatgaaaacacaggttggcgtcgcaaaaacacgcggatcatcaattccggcattgcgagcaattctgagcattgtatcttctacccgatacatttcgctcccgccttcgatcattagtcggcccgcagttaaacaaatatccattacttcttgataaaattggacatcccgcttctcagacatagttttagcctcagttcatagtttcaatatcgatggtcttgtcgacccaatcaccgcggaaaaagtcacgttcgtgactaacaataatgactccgcctgggaagttaacaatcgcttttctcaaagcatccttggtatcgttatccaagtgattagtaggttcatcaaggaaaagcaaattagctggttcaaactgcatcttagctaattttactttttcctgttccccaccagaaagttcctttagtggactcattgcttgttgtgcagttaagcccatgcgtgccagcgcttgtcgcaattcctttggctttttgcgttcaaattcttcttgtaaatattggagtggagtcatgttgctattaggccaggttagatcttgcttgaagtaagccaactttgcagtaacagataactcatatgaaccataaattggctttaattgccctaacaatgtcttaagcaaggtagtcttaccaattccgttaaaaccagtaatcgccactttttcatccccaccaacagagaaattgaaggctgacttgaccaaagcatggtcgtaaccgatgaccaaatcttgcgtctgtagcaacaaattagaagcagtcgcaacatatggaaattcaaagcgtgccttgcggttgttttttggcggtgtcaaaacatccatccgcgccagctgcttttcccgtgacttagcactcttagcacgtgtacccgccttgttcttgcgaatataggcctcagtcttagcaatcttgcgttgctggttagcataagccttcaagtaggtctcacggttggctgctttttgccgcaaggcttgcttcaacgttcctgtataacgagtaattgtgccaaaatcgatatcgataatgcagttagtgattcggcccaaaaagtcataatcatgactaacgacaataaaggctccagcaaaattgttcaaatagtcaaccagccaatcaatatgtgaaacatcaagatagttagtcggttcgtctaaaaccagaacatctgggctttgcaacaacaactttgctaaaattattttagagcgctgaccaccagataacttagaaacatcgtgatcatagcctaaatcagctagtcctagtcctgaggcgacttgttcaatttcagtatcaatatcataaaaattattttcttctaaataagtctgtaccttgccggctttttctaacagggcttcgtccccgttttcggcatatttggcatacagatcattcaactctttttctttttgaaataattgatcaaaagccgtccgcaaaaagccacggatagtcacaccaggtgccaatttagcatactggtccaaataaccaacatcaattttattttgccaagttacttgaccatcatcgggcaaaatttcacccgttaaaatcttgattaacgttgacttgccaacaccattttgaccagtaacccccatatggtcttctttgttaagcacaaaattggcatcttcatataaagttttatcaataaaactctgacttaaatctttaacagttaataaactcatttttcatcccctattatttagctgattcatgttctttttcataattttggagtgcatcaagaacacgaggccaatagcgcttaggtaagatcaattgcaaacgatcatgataaataggaaaatcacttgcttttagccccgtaatcttagctagctcctgatctgtcagcttatatttataaacaatacgcttaatttcgactgatgcatgtcctctaaaataggataggccgaagaaaaagatagcaaaaacacttgctgtaatgattgctaattgcaaattcatcctgaagctgtgtagacaaataaaaatcacggcaataaaagaaatcacagctgagagtacaccgtaaataactggaaatattgattctttttcttccttttgcataatcttttcctccctaattgagacttagtaactttacgaacttagcaaaaattgttaaagtttgcaagatacgacgttttcattattttttacataagttaagtatacttagcaaaaatgaaattgcacgaagaaagaagaaaaatgagccaagaaaagcaaaaatactattttttcccacttcgttttcaacaacaggacttaaagattgaactagttttgcctcaaattacgcaagctgaggcactttatcaagctgttgtccgcgatcgaaagcaattaggtcaatggctagcctgggctgatcaaatgcactcagctaacgatgaagcaaaatttattaagcaaattcaaaccaaaatgtcccagcagactatgctcgtgctcactattttagtcaatggcgaacctagcggcatgatcgacttgcataagctagtgccaaataaaaaagccgagattggctattggcttgctagcaagtatcaaggccgcggcattgttactaagagtgtaacggcgttatgccaatatgcctttagtgaattgaacttgcaatacattgatctgctcgttgccgttggcaatgacaagagcagcaatgtcgcaaagcgttgcggttttaaattaatggggattgagccaaaattaattaatggctatgacggccaaatttttagattaattcgacgttaaaactactttgttagcttgtcattgcgttaaatattaggtagactaataaaacgagtgtttggaatcttaatactttactaccaaaacaaactcaaatataattatgttatacgatgcttagcatcaatgagtggtcggctcagggtcaatctgattctaatgcaggacataagggcctgacgggtcgcagggaccaaaataaacctgatattatatatctaagacataagggcttagctggtggcagacaccaaaattaaaccgacttaagagttcacgagtttgtgaactcttttttattggagaaaaaagagatgaatcgcaacttatttaaaaacgcaaatttaaaagaaatcggacaattacgtcgttatatgtcgattatttatgataatgctgacttttacagcaaacactttgtaaacaaaaccattatctacactactaagaataaaaaaaatcgaacttactgctagaagagataattttatgcatttgtgtggagtaacgtatatcgacggtccaagaaaattttttaatgatgcattagatcaaaaaatacaaatcaaaaaaatacttataaaaaaagatgggtctacctttcaaaaattacaaattatgaatcaatttcaagaaatgcttggaccacatttaagattaacaggacccagtaattttacatatttaaaatttgatcactctatacgtaccaacaaaagcatactagctcttgcactattaaataatcaaaactacatgatacctatctctttattaaatctaaaatttattcatccttttccaaatggagaaaaaataataaaaatagaatctcgagatctaaaaactggtaaaattactattctcaactaaaaccaaccagtcagatctttaataatgaaaaagataattggaactaacaatgatggtaaaaaatttagcgttttaacatcacgaatcttcaataaagctaagccagagcaggcaattaaaaagccaccaacaatggaaatctcagttaccaatggtcccgtaaaaaagctagccgacaaaaatttagctaccaggtaaatactaccctgccagcaaaatagcaccggagcaacaacgagcatcccccaaccgaaactagcgccaaaaaccatcgaggtcacaaaatccaacgtagcattagtaaacagcatcgtatagtcgcctttaactgccgcaattactggccccacaattgatagtgctccaatacaacaaagcaaaatttcagtggccagccctttacctaagtttgatttacctgttttttctactaagcgatcaaaatggccagagatatcccaagccgtgccgcacaaaccaccaagtgctaagctaacaataaataaaacaggatagtgactcttgggcatattattagtaacattctcccagccaatacctaaggctgctaaacccattgcaataaagagtacatcttcaaatcgtttattgattccttttttcaaaaaacagccaatagttgttcctactagtaaggctaacgtatttacaattgttccaatcatccttctcacctcttaagattattttaccgcagaaaaaaagtatccttgtcggatactctttcatttaccagtgaaaatgccaaccgctacttgaactggatgatgaacttgaactagacgagctgcctgtccctgttccttcaccataaccagaattagaaccgctggctggcttatcctgattttgatcataaatctgatagtttgtaaaagcctgcggatcatcccacttaatgtgattgttctgatcattcaactcattctgccgtgtttcctcgttattaagcgtttgggtcgataaattcaaattcttgcgaattctatcagaagtcttttgcaattccttagttgaagcaacttgaattgaggctccatcaatccaggcatcatgaccttgaatatagctactcttcatatttttcatacagccacgataattcaacgccaagcttaacatatcgttgaaggtcaaattagttttcacatacttattaaagacatcaactagcttgcggtaattgctgagcgtattaactgacatggccttgtgggcaattgcctcaattacttgacgctggcgcatctgacgaccatagtcaccacgtggatcttcttttctcatccgcacataagctacagcatgccggccatttaagtgctgtttacccttgtggaaatcacaccagtcatatgaaaagtcaaacggcacattcacatcaacaccgcctaccgcattaaccaagctcttcaatgccttcatatttacttcaagataataattgattggcacattaagcatggacgagaccgtcttcatacttgattcatgtccgccaatttcataagcagagttcacccggaacataaagtatttgtcacctggatcgcctttaatatctgctaaggtgtcacgtggaattgaggtcatcgttgccgagtttttttgcggattagccgtggctaaaatcatggtatccgaattacctcgatcatgccgtccttcaattccttggtcaactcccaacactaaaattgaaattggctgtcgattaacaattttagcggaagtagcagtattaccgccattcttgctatcaatcacactgtggacagtaaagtacatatgtgcggcccaagctacgccaaagcaaacagctaataaagctaccacgcccactagccgagccagaaagttccctggcttcagcgctggcgcgtctgccgcaaatgcacgattacggtgaagattaagcgatgaacgacgagcacgataatcttctcttcgttttggattttggtccattcttttgatcttttcccttcgaaattaatacaagttagtttatttgtatcacttttcgtctctagataaaataaaaataccgataattaataataacttatttttttgcgaaagatagcataacaggctaagatgtataccaattgaaataattatggaggaaaaatatggcgataccaaacagaaatgaagtcccagaagaacttaagtgggacttgacccgaatttttaaaaatgatgaagaatgggaacaggcctatgcagcggcccaagaaaaaatcgaccaacttggtgaattaaaaggtacattagcaaaatctggcaaagatttgtacgaaggcttaactaagattctggccgttaagcgcgaggtggaaaatatttatgtttatgccaccatgtctagcgatgtggatactgccaattcacattatttaggctatgtcagccgggtgcaaagcttagctaaccaattcgaagccgctactagttttattaacccagaaatcttgagcatccctagtgataaactagctgaatttaagcaagctgagccaagactaaagaattatgctcactacttggaaatgattactaataagcgacctcataccctgccagctgaacaagaaaagttaatcgctgatgctggagatgctttaggcgtttccgaaaatacttttaacgttttaactaactctgacatggaatacggctacgtccaagatgacgatggcaacatggaacaactatctgacggtttgtactcattattaattcaatcgcaaaaccgtgacgtcagaaaaggtgccttcgacactctctatgctacgtacagccaattccagaattcgctggcttcaaccttgtccggcgtagtgaaaaaacacaactataacgctaaagcgcacaaatatgactctgcccgtcaagcagcactggctgaaaacggcgtacctgaagcagtttacgatactttaattcaagaagttgattctcaccttgacctgctccatcgttacgttgccttgcgcaagaaaattttaggcttaaaagatttgcaaatgtgggacatgtacgtgccgctaactgggaagccttctctttcttataactttgaagaagctaaggaagttgctaaaaaggcattgaagcctttgggcgaagactacttgaagcatgttgactatatttttaataatcgtgtcatcgacccaatagaatctaaaaacaaggtaactggtgcctactccggtggtgcttatgataccgatccttatgagttgctcaactgggaagataacatcgattcactttatactttagtccacgaaactggtcactccgttcactcctggtacactcgcaatactcaaccttacgtttacggcgactatccaatctttgtggctgaaattgcttcaactactaatgaaaatattttgaccgaatatttcttagaccacattaccgatcctaagacgcgggcctttatcttaaattactaccttgattcatttaaaggcactttattccgtcaaactcaatttgccgtgtttgaacaattcttgcacgaagccgatgctaatggagaaccactgaccgctgacactttagacgacgtttacggtcaaattaatcagcattattacggcgatagcgttgaaccaggcggcgatattgcccttgaatggtcacgaattccacacttctactacaatttctatgtgtaccaatatgcgactggctttgcggctgcaacagcattagcaaacaaggtggttcatggaacgcctgctgagagggatgcctaccttggctttcttaaagctggttcaagtgattacccaactgagatcatgaagcgtgctggcgtagacatgactaagcctgactacttagaagatgccttcaagacttttgaaaaacggttgaacgaatttgaaagcttgattgagaaataaataatcgcgctcatataaaaaatcgatatcatttcgtaagatttgatatcgatttttttgttgatgatacttatttttatttaaattgaacctgttagacctgcatcccgccatttattggaattttcgtttaactttagctgtaattcagttaatggttgaggcagcttgaaattatgtgacaatgaataattattcagatcacgtttcaagtcaaagactaccttttcaatattaactccctgctccaaattacttaaagcgtgattgattagctctactgctgcgctatcttcgacaaccttttgttttacaccgactagaagtgatttcaactcttttgcgttttccatatcgttctcctatcacgctcatataaaaataatcggtatcattttagcatatttgataccgattatttttatcgattttaattacttaattccaaaaatctacgattaattgtataaatacaaattaacattaaaattacaatcagtgttgccaccaataccgtcaatttaattttagaagtaccataatctgtgctcaatatcttaggtgaaaagtcctgtaaaaagtgtactaccatacaccaaattaatccattggaccacactcttagataactaaggaataaccccatacccaatgtaataatcacttgaccaacagttgaaattaatgattgactagttaaattatttaaatgatataagccgaacagaattgaacatacaatagatgtccataagatatcatatttttctttacgaaaaactagcaagaaagtattaaataaaatccctctaaataaaaattcctcacagattgcgggcaatatcgcagctaaagccgctaccattatttgatacagaggcaacttaaataataatattttatcttttaatgctccaaaaagtattaaggccaaaaagacacagtagatgatcatcattacttttgatattccttgcaattttagcctttgattaaaagtcttagtcgttaaaataaaatgctcggctacatatgcaaaagcgactataaagatgattacaatcaaccacttggttatcatgttgcctacaattaaatgtggcaacacaaatgaacctattaaaagaatgattgcaagtataaatagatttctgattgttttattgacttcagccttattactaaattctacttcatcggctaatgccaagtaatatttattattcaatgtttcaccctaatacttttatatgaaataataaggctaataaattctaattaaatttattagccttattacttataactttccaacgttccaaatactaataggtctcatcgaactattcagcatttgactaacatttcgtagagttctcccaaaattgcgaccagcatagtaattacgagagtgtcctttaccacctatagtattttttaattgatctaacgtcaattcttccattttaatactttctttttatttacctgctaagccatcacgaaggcctgacataaactgacttacgcccctttgtacatttctccaccaagagcttttaccacgaccacctacaatattttgtaattcagcagtacttagtttttgaaaattattcatttctatacctccaatactaattagcaaatttctttaccgataattattcatttcgttttcttgacttgaaaataaagttaataatgtcaactgtatctacaatcaatgcaacaactgctacaattgctgctacccaagtaccaatttgagtcttgggagtataaaaccaagtcacaagaaaagaaatatttactaataacattaaatagtctttcatttttctcctaccaagttgatatcgattaacctttcatcttattactttaaaagctaccttgtttacgtcagcttaatcagtttcctagttctaaatatatagtccaagaataacgcccctgaaatttgacttataatcgaaatacgcgaggatgcgttcactaataaaatgtatcaaatcaaacaataacatgtttaaaggatattatattgataaaaaattaaagcaacgatatccaataaaacacttctaaacaaaagttttttatagagaagagcagttaaatttctcaaaactactaaaataaagaatattatcttatacttttgcctataacttaaattttatcccaaaaagtggctgataatcttagctccagtccaaataacatttgcaaccgttcctgcagccctaatatttctaccagtaccacgaccattgtagtagtttcgagagtgactacctcctacaacacttactaatttgtttgaatttaacttttcaaaattaacagtactttccattttgatacctccgataaatctttaagcctgcctcacttagtacctctaagtaccttatcaacttacatatataactttaccagaatagtggtattttctatgacattgtcataagttagcaacatccacatcatattctgctaaagtacataatttgatccaaaactgcctactatatgagtttcaatcatcgacatctcactaattttacttagaatttagcaatttagacttaatataattaaagtaactagcttttcctgtaataattgacactttaccttgcatcccataccgcaaaaactttctttctgacttggtagtcttaagcatagtctctacttcaaacatgctcatccctttttgttggacaggataagtacctatactaataattttcccattaagtatctcagacattccttgcttattctcaatctgaaatctcacttgttgtcctttattaagtacagcaacttcagaactagggacatatgttactactctcagttttctcctattttttatatctggcatagcaacactatctttgttatccaaatggacaatagcattatcttttaatactctttttttaccattagctaaggtgagattaatcccctttgacagtttttgcccctctctatatgctctattctgcaaagataatacatgatctggcgtgataacacccatactattaaccacattttcatgtacagcaaagaaagatcccaaaaataatagaattactaaaataaaggctggcaaaattatcatcgtggaaaagttgcgaaacttataggaatagaacttactactttccaaatcttgatcactcattaatatcacctaacttttcaccaaattgtaataatagccacgctttttcattaattcgttatgattaccttgttctacaacttgaccttgattcaataccacaatattgtcagttctctcagcaatagctaaacgatgcgcaataaatataacagttttattctttaacctaattaaattatcaaccacttttttctcagtaattgtatcaagcccacttgttgcttcatcaaaaatcaataccttagcaggtgaaagtaaggccctagcaattgttaatctttgcttctgaccacctgacaaaatcttagcattttcatctaattgtgtattaaatcctaatggcaatttttcaatgtcattctttatctccgcgatttggcaagcttcttctatctctttttcagttatattcttacgacttcccaacaaaagattctctttaatggtacctgcaaaaatatatggagtttgtggcacataattcacatatgagcgtaaaacatgcttatttatacttctagtcgaatgaccattaaaagttacttttccttttgtgggactgaaaaaatcaaccaacaatttaaccatagttgacttacctgatccactcattcccacaatagttaatttctcattatctttgatcgtcaaattaatatcttttaagacatcttcaccatatccataacgataatcgacatgtgagaaattaatgtctccatttaaatcatgactatcattaactgaagttttgcccttaaattcactttgaactaaataaacttcatttaaacgattctgagctacatttgcagcttgaagtgtaggttgcaagttaataatattttgtaatggatcaataaaatatgataataatgcattaaatgccatcaattcaccaatagacatttgattatgcattacaacacttgcccccacccaaagaataatgacattcagtgataatctaataaaagttttcaaagcagtttgaaaagcttctgttttgctatacttaaaagctttttttaaataatcaacaaactgactatcaatttttcgataacgtacttgttcactgtttaatgctttaatcgtctcaattccttgaatatcttcaataattgatgaactaactaccgcattactttccatctggtcattatttaatctttcaaacctttttgaaaagccgagaataacaatagcatagagtggtaatgaagctagcgtaatcaaaaacaatgtcatgttttgaaccgccaaaattatacccattaaaattacaattgaaagatcaaggaataatgaaatcaccgtacttgccaatgcatctataattctacttgcatcagaaaaacgagaagtaatctcaccagtttttctggtagtaaaaaattccatcggtaattcaaaaatatgcttaatgtattgtaaattaagatcgattgataaccgctgccccaaaacattcaataaaaattgctgaccatatgaaaaaattgagttaaagacatatgcaatcaataacccaatagctaaaacagataacgtggtaaatgtaccgttaggaatatatgtatcaatcaacccttgtacaaaatatgagctacagatactaatcagtgtcatcagcaaagcagctaaaataatgtttctaactaactttttctgtttaaacatataagggaataatgataatagattattctttttctcctttacaggcttaaaatctgccttaggcaccataaacaatgtaatacctgtccactctttttcaaacgcctttttggacatttttttaattccactagtaggatcaggatcggctacgattatttttcttttagtacttttaagaactacataataatgtaacaatcctccatcttttatcacatgaacaataaaaggatattgaatatctttcatattgaataaggacatatctgcttttaccgcttgaacatccatattgaatttttccgcagttttaactaatcctaaagcagtagttccttcagtattggttttagcaatatgacgtaaatgtgctattgatacttgagaatgataattctttaagatcattgctaaacaagctgcaccacagtctgtttcatcgatttgtggaacataaattgatttatacgttaacatgcccatcatttatctctttctgcttagctaatttctctgttttataattatatctagcaagaaaatctttcatcattttcacactactacgtgaaaaatcttcaacatccccattaacaaatgagacacgatgctgtttcaaatcaatcgactcaatgttcttcggattcaccaaacaagactggttaatcttctctaacataggattttctttagcatattgattaatactacctaaaagttgcatttcacctgtcgtcaagatcattaataacttgtgcggggttatagttgttgaaatataaataatatcatcaatattgacattcctagtttgacgtccaattttatacgaaaaagtcattttcttcatataattgaatttgtgtaagttgtagatagctacttctacagtctttaccatcatctgtctaaatttatccaaatcagatgtttttacaatgtagtcaattggacctaatcgtcttctgaatgtaattaatgataagtctgcatgactagttacaaagataatttgagctcgttcatctcgctttttaattaaggcagccagatcaaagccagtatcttcttccgtatcaccgcctaattcaacatcaagaaagtagataccaccatctaatttatgtttcttcagataatcaattgcacccatgtaatcagttgcagatgcaattgaaaattcaatttcttcatcatctgacaaaatcatttccgcagcaccaagaattttcttagtttgctcaatttgattttgatcatcatcacaaataaatactggatattgcattttttatttttcagtcccactttcactatcaggcaaaattgttaaatcaaaagtaaaccacccatcatcaacatagtaattaacaatcattgaatcttcatatttatgagtaatttcttttacattcgctagtcctaaacccatatgatgtttcttggttgtataattcttttgacttattttatctgtcgctactccactttttctaacgcgatttcgaatttcaaactcgaaatcgccgttttcttgataatacattgcatctattcgcgcactattagagttacctgtttctttgatcaaggcctgactttcttctgcagcattatcaaacgtgataccaattattctgaccagatctaaaatattaacactatcaggaattcgagaaatgtcgtgttcacaatcgaaactataatctagacctaaactataaagtttagacaacttagcaattgcgatacttttcaagttcttctcatggatatgatttacaccattatatttacgcaaagcctttttattaaattgcgtttcagtatactgatcaagtatttttacaacttctgcagtattaccttcttgagcacttacttttaagccatttaaaatattttgatagtcgtgtttgaaacgatgcaaatcatcttcatttttatcaagataatttgaatattcctgtaattgttccatctcagaactcaattgctgctgtttaagaatcagttccttattttctgcttcttttgcttttctatcagcatttgctagttcaagctgaaatttttgctctttttgttcttgtttagttagaaggcctttttgcactttaatgatagctatataagtaattacagagaaaactatctgaagcactaataaactcaaagacacttcaaaaactatagtcatatgtgtacttttcaatgctaaaaaatacacaatagagcttgataaataaacgtaaaatattaatccaataaaaatcgaactatttcgatcatttagtaacttacgaatttttaaataatacttttgaattataactataattacgaattccactagcaaaaatacaaaagtcatgctactagaactaatatcaaaaattaatagtattatttcagcactaattgttataagaagatctaataattcaaaaaataaaattcgccgattgtaaaattaacttgaacactttgtagaaaataaaagtccatttggacctgtttgatagaatgttaataaccacaaaaacatctatggaggtcaaaatggactcactacattttatcatggacaagcgcaaaaaaggaactcatttatcgctcgaagaacgagtcattattcaaactcgtttgaaagatcattgctctttacgctccattgcacgagaaatcggttgttctcctagtacaattcactatgagattaagcgaggaaccgttaagctgtatcatggcaatatcaaacgttataaagcccagcaaggccaaagcgtttatcaaaaccatcgtcagcactgtggtcgaaaatctgactttctcaaaaagcacaaatttattgattacgttcaacggcacttctttgaagatggctggtcactcgatgtctgcagtaatcgctgcactgctgtgggtgaatttgccagcagcgatattgtctgcaccaggacgctttataattatgtcgatcaaggtctattagatatacataattacgacttgcctgagaagcttaaacgcaatactaagcttcatcgtgttcgcaaaaataagaaaaaacttggcagaagcattgaagaacgtcctaaagagatcaataaacgtaatgagtttggccattgggaatgcgatttagttctcggacataagagcaaagatgatgaggtgctgctaaccttatctgagcgtatgagtcgtgagttcttaattcttcgtattcctgacaagacttctgtcagtgtcatgcaggcctttaaagaactccaaaggcaatacagcgaacattggaatgatatctttaaaactattacgactgacaatggctctgaatttgcagatctatctcagctggaagatatttcccaaaccttggtttattatgctcatccttatacatcttgtgacaaaggaaccgttgaaagacataatggactcattcgcagatttattcctaagggagaggcaatagacaattattcactacaagacatcatagacattgaaacctggtgcaactctttaccaagaaagatattggcatatcatacaccagatgaaatctttgaaaaggaattggatcgtatctatcaaacagcataagtgttcaatttattattgcaatttacgaaaaaataaaattgccccaaaaataaattttacttttttctctttttttaccaaatatgaaaaaaggaatattaaaaacgcttgaataatatctactaaaaaatcatctatttgtactacactaccagctaatacgcatgttccaataaaaactatcgaaaatgcataatcttctctcttaaacttccagcctgacaatcgataaaaaatatacaaatcaattacaggagaaaataaagcttgaaaaaacattttctattttaatccaaaaattttcttccagttaaaatgatttctatgttttttatttattgtgatatcgttaagagcaaaaaaactaactgtaggatcagcaaatccacccttaacttcaactaattccttttcattcaactttttcataattcaaatttcctttcaattaactaacaatttttacactattaatgttactacacacataatctcacaactaaagtcgtcaaattttgcaccattcaaatcatattctgcattttcatttaaaatgttcctccaccagaaccatttccccatccccgagaattactcttgaagaaatgccgtctaatttttgaccgtcctccaacaattttttctagaatcgaagtcgacaattttcgcatgatcttcctctcctttacttaaaaattattatagaaaaatcataaacctattctgtttatcaaaaatcagctcatcaaatcttgcaccattttgatcatattttgcaaaaaatgatcgatattgtacgagtactatccctccggccaaaaaagatcatccaacgttttatccagcgcctgacaaattttgatacataagttaatcgagggattataatttcccttctcaatcgcagaaattgtctgtcttgaaacatcaatctgctgcgccaaatcttcttgcgttaagtctttaccgactcgtgcagccttcatttttaaatttttcaatccttatcactttccttatcacgatggagttgaaacaggcttactactccaataatcaaccaataaatccccataatgttcagcgcactgttaaagtcatcaatatatcctagaatcaagcaaataccaagtacaacatatagccaactatttgccttaacatgctcttcattaaatgcaaaatatgctccatggactatatcgtaaactgacatcaccgttaatgacaacataataattgcaaagttaacagcaataccatgctttgtataaaaatccgtctgcatgaataaagcagaaattacttctccaacgattaacacaagaaagccatacctgtcaccacgaccacgaatcaattcctgtcgttcatcatactttgccgcacgacgatttcccacgaatacaacgactaagatgaaagtcataactgcaaacaagcttgcaaaagccattaattttaatatttcaaattttgacattttacacatccctttcttttaatagtttgatattaagcccatatttgcaaaatgtaaagtatgttttacatttttactaataaatttgtatttataaaaactagcattaacataatcggtatcatttcgtgagatttgataccgattatttgttaatgatcctgatttttcaaaaatttccttgacttcttcttttcatcgtcgtattataatgacaattaaattaataaaagcttagaagagatgagtaattacttaagacttctgcagagagtcggagttggtgcaagccgatgtagtcgatagtaacgaatatggtcttggagctattttaaagagcaagctattaagtaagcaatttacgagtgacgatcgttaccccgtccgagtattcccaattttgggagcacttagtaaggagttagttgtgaagctaacttgaatttgggtggtaacacgcttaggcgtccctagcatagaaattctatgctaagggcgctttttattttgcttatttaatttttcagaaaggagccagacaatggataaacctatcaaaactacaagttcacaaatcatcatcagtaaaaaggcattcaaccgaatgtgcactattgtctggttgatcttgatcatcatcggacttttcatcgttaaataaaacatcgaagcaaaactaaggagaaaaattatgacagaattacattacgatatcgttggtagctttttaagacctgcagaattaaaaaaggctcgcgcagaatttgaagaaggaaagattaagcaagaagaattaactcatgttgaaaataaagagatcagagaattagttcaaaaagagattgatcatggtcttaaaatcgtaactgatggtgaatttagaagaagttactggcacctcgatactttctggggctttgggggtattaaacacactaagcaggcccacggctatttcttccatgatgaagaaactcgtaacgactctgcccaagttgaaggtaaaatcaaatttactggtaaacatccagatctttcatcatttgaatacctgaaaaaagttgtcgatgaaactggcgctaacgtaattccacggcaaagtattccagctcccgcacaattttacgcagaacttgttcgtggagaagaaaatattgccgcgcttaaaaagatttatagctcagaagaagatttactcaccgatatttctaaagcataccgagacttaattttagccttatacgatgcaggatgtcgcgacattaaactcgatgactgtacttggggtatgattgtagataagcgctattggaaaagtcatttacaagatgacttttcattagacgaccttaaaagaaaatacttgaagcttaacaatgatgcaatcaaagatttgccaacagatttgcgaatatcaactcatatttgtcgcggtaactatcactcaacttgggcagcccaaggaggttatggtctagtagcggactatgtttttgctaaggaaaatgttgacgccttttatcttgaatttgacaatgatagatctggcagttttgacccaattgcacaaattcctaacgacaaacttgttgtcttaggtttagtaactagtaaaaaagcagaattagaagatccacaaaaattaatcgctagaattaaagaagctgctgaattccacccactaaatagtctcgctttaagcacacagtgtggcttcgcctcaactgaagaaggcaacacgttaaccgaaaatgaccagtggcaaaagatcaagttggttgtcgacactgccaagcaagtttggagctaaatggcaattaactagttaaaataaagataaatagatttagacaaaggagaaaaaaatcatgggaaaagttgaaagttttgaattagatcatactaaagttaaggcaccttacgttcgtttaatcactgttgaaaaaggccaaaaaggtgaccagattagcaacttcgatttgcgtttagttcaacctaataagaacgccattcctactggcggcttgcacacgattgaacaccttttagccggtcttttacgtgaccgcatcgacggctacattgactgttcaccatttggctgtcggactggcttccatcttttagtttggggcaccccatcaactactgaagttgccaaggcacttaaggagtcattagaagaaatccgtgacaacattaaatgggaagacgtaccaggaacgacaattgaatcttgtggtaattatcgcgaccactcattattctcagctaagcaatggtcaagagatattttggctgaaggcatttctgatgacccatttgaaagacatgtagttgaataaaattttgactgtataatcaaaaagctgataattcatttttacgtgaattatcagcttttattttgtcaataattatatttacttactattcattcaacttcaaatatctgctattgaaagcataaatacatattagcataataattattactggaacattcatcataattactccagcaatattaggattgcccaaatccgcttttgccaactgtggagaaaaatcttgcaaaaagtggaagattatacaccaagtcaagccattggtccaaatgtgcaaataactaaaaattaaataccctagtagtgaaactaaaatgtttagcaaccacagcaaaaactgtaacgtacgctactaagataaccgttgccataacgcgctgatttttacccaatagatttaataagactgggtaaagctgataacatagctgaagcactacttccagtatgattaatccaattactgcttttttcacattatccttattatctagttcaacttcatcagctaatgccaaataatacttatctttcataagttcacccattatttttttatatccattgttttatgaaattgaaatagtgatacaacaaaaatccagtcttgatctgtaatcaaaattggattctaaggtatcctgaacctgatcaaagcctttgtggattcgattgaaataacggtcattgtagctcattgcctgaatgccaataaaagtattaagcgactgttcagttggaaactctgctttaggcttagctttacgcttgataacgttgttaaaggattcgatcatattggtagagtaaattgaagccctgatctgcttaggatagctgtaaaagaccagcagatcaggttcaatctctttgagatttctgatgacatggttgtacgctctgttccacttgtcatagaaagcgtgcaagactttgatcgcggcttccttatttggctgttgatgaatttgcttgaattcattcatgatcgtttcgcgatcatctacgcatactttagcgcaaatattgcgcatgacatgaactagacagcgttgaaaatgagctttcggataagtctgctccagcactgtcttcatgcccacaacgccatctgaaagaaagagctaaacttgttctagaccgcgagacttcatgtcttgaaacatttccgtccaattctcgacgttttcgctgggagcaatgcggtaatcgatgacttccttgtgaccattaggcttgatgccaatggcaatatagactgcttcacgctcaaacgtttctcggcgcaaaggaatgtaggtagcgtccaaataaacgcagaagaacttgtcactgagtttgcgctgatgataggcctcgacttttggaatcatctgcttggagatgttagagacctgagctgggctgtaatgactgccatacatcttttcaatcaagtcggctatttctctagtggttacgcctttggaatatagtttgataatcatgctttccaagacattggagtgctgcttgtagtcagggagcgtgtgctgatgaaacatgccgtttcgatccctaggcacctgaatttcaatctcgccaaattgcgtatcaaccttgcgaaaataagcaccattgcgtgaattgcctgtattccagccagctctggcataaggatcatagcctaaaaacgcagtcagttcagcttctaataggtcattaactgcttgctggagttcttctttctgtatgtgtttttttgttcaaaccaatcatacgagaaaggaactcctttttctaatgttttaagaaattaatttaaggaattattcatccttacacaaactattttacagtctcgaatttgaaactgtcaaatcttttgtgtaaatagatctttctcgtaaattgattttttaattatttatttaatcaaagtaggattctaaggtgtcctgaacctgaccaaagcctttatgaattcgattgaaataacggtcattgtagctcattgcctgaatgccaataaaagcatcaagcgactgttcagttggaaactctgccttaggcttagctttgcgcttgatcacattgttaaatgattcaatcatgttagtcgaataaattgaagctctgatctgcttgggatagttataaaagaccagcagatctggttctatgtctttcaagcttctgataacatggctgtaaaccttgccccatttggtatagaagtcatgcaggacagctgtggcttcttctttgtttgtctgttgatgcacctgtttgaattcgttcatgatcttttcacgatcgtcgacgcgtactttagcgcagatattgcgcatgacatgaaccaaacagcgttgaaaatgagctttaggataagtcctggccaaggctgttttcatgccaacaacaccatcagaaagaaaaagctcaacttgctttaagcctcgggatttcatgttttgaagcatatctgtccagacttcaatgttctcgctaggtgcaatgcagtagtcaatgacctccttgtgcccattaggcttgatgccaatggcaatatagactgcttcacgctcaaatgtttctcggcgcaaaggaaggtatgtcgcatccaaatagacgcagaaaaacttgtcgcttagcttgcgtttgtggtaagcctcaacctttggaatcatctgcttggaaatatttgatacctgagctggactgtaatggctgccatacatcttttcaattagatcggctatttccctggtggtcacgcccttggagtaaagcttgataatcatgctttccaagatatccgagtgctgcttgtagtcaggcagcgtgtgctgatgaaattgaccgttgcgatcccgaggcacttgcacttcaattgggccaaattgcgtatcaactttgcggaaataagcaccatttctagagttgccagtattccagccatttctggcatagggatcatagcccagaaaggcggtcaattcagcttctaacaagttattaacagcctgttgtagctctttgcgcaataaatcatttattttgtctggattgaatagagcttgagcaaaatctttggtaaaatcattcatgaaggagttcttctttctgtatgtgtttttttgttcaaaccaatcatacgagaaaggaactcctttttctaatgtttaaagaaataaatttaaggaatcattcatccttacacaaactattttacagtctctagaatttaataccttagacttaatataattaaagtaattagtcttaccagtaatgattgtcacttttccttgcatcccatatcgtaaaaactctctctcagacttagttgtcttaattaaaatatcaactttaaatgcattcatgcctttctgttgtacaggatatgtacctaaactaataaccttaccattgagtattgtaagtactccctgcttatttttaacttgaaatcgaactttttgtctttcagcaagagtagctacttcatcatctggaatgtaggttactattttaagactacctttatctttaatatcgggcatagcaatactatcttcatcatctaaatgtacgataatattattttttatcagtcgttttttgttatcagccaaagtaataatagtaccctttgaaatcttttgtccttctttatatccattacttaaacttcccacactaaataagccagtaatctcttgatcttgcttggctttaggcttctatattatttttgctagttttctttaacaatttttgcatgtatttgggtaaacgattgataaagtcagccgtgaattcagctatttgtgcttcactggcatgaaagacttgctttacgctggccagcattgcatcagtaatcaattgcaaggaatggctaaaagtaatgtccgccagctcatcaatcatgcaatagaacagctcgcctagcgtgcgttcatcttcatcgtcccgcttggcaactgacataagcatgtagcgagtaaaaactatggcaacatgagcggtcaaagcatcgtaagacaggccatgatattccgtacttagttttagataacttttgcaagttttgaaaaaaacctcaatatcccaacgcttgccgtagttgcggataatttcatcttcgctaagcgacatgtcggtacaaatgattgccagccaatccttgcgattggcacggtttctaacgcagacaatccgtgcatctattttagcaccgtctttgtcctggcgtccgactttgactgggattgacagcaggtagcgagaacggccgcatcgctttttacagctgcgataaatctgtttgatgtttttgcgttctccctcaaattcatatttgattttggagctcaccttaaccatggcaatcacatccagcttcctttgcttgagctggacgatttgatgtggatttgagaaccagctgtcaaacagcacgtacttggcttgatgacctgctttcatagcttggtcgattaaattaaccatcacgtctgtgcctttagtccgggcaagcatacgtctttggccagcaatggtgcgctgatcaaaaactttattttcgccaatcatattctgtagcttctgagaagacagcagcactgaattgattggcatgaaagaagctccatcagtccagcccagggtcatcatgcgaaaacctttcttgtaagtcattgatacatggtcaaaaactttggcgactaattctgttttcttgaagccggtcctagagaagtaggaatcatcgacaacaaagcaatcagcccgtttttctgaagtcaaagatcgcaagtggttattaatgatttgcgcagacagacgtgtggtgaagtggagccaattgacgtgaacgttgcgcataaaacggtaatatgagttcttggaaaaattttcttgaaaatgatccattttcagctgcatatataagctgcggtcacgaaagacattgcttaaaacgtaaagaaacaagctgaacaggctaatgcctttttccttgcggaagccacattttctcaacagcttgatcacctgaaacttcttgatgaagctgatgattgagtttgaaaatagttgttcattttgttggtcaggagatggtaaaatagacattggcacaagcctttcatgcaaataaattatgttttggtcaatataattatagcaatgaaaaggacttgtgccttttatatttgtcaaaacacgcagaatcacaatgaaacaagcaattttgcgtgtgggaagtttaagtccattattttttaaagaaactatatggtctggttcaacaacacctatactattaatcacattttcatgcacagcaaaaaaagaaccaataaacaacaaaattactaaaataaaagccggtaaaattatcatcgttgaaaagttatgaaacttatatgaataaaacttactactttctaaatattgatcattcatttaatatcacctaactttttaccaaatcataataataaccgtgcttggccattaattcagtatgattgccttgttctacaattcgaccttggtttaataccacaatattgtctgttctttcagcaatagctaaacgatgagcaataaatattacagtcttatccttcagacttattaaattatcaactacttttttctctgtaattgtatccagcccacttgttgcttcatcaaaaattaacaccttagcaggtgaaagaagtgctctagcaattgtcagtctttgtttttgtcccccccgataaaatttttgcattctcatctaattgagtatcaaatcctaaaggtagcttctcaatatcattttttatttctgcaatttgacatgcttcggctatatcttcttctgttatattagaacgacttcctaataaaagattttctttaatagtgcccgcaaagacataaggagtttgtggaacataatttacatatgaacgtagaacgtgcttatttatctctttagttgaataattattaaaagttactttaccttttatcggactaaaaaaatcaaccaataacttaaccaaagttgatttaccgagactgtaaaatagtttgtgtaaggatgaatgattccttaaatttatttctttaaacattagaaaaaggagttcctttctcgtatgattggtttgaacaaaaaaacacatacagaaagaagaactccttcatgaatgattttaccaaagattttgctcaagctctattcaatccagacaaaagtaagtgtcaatgtttttgcggtagcctttaaaccattagtctaaccttaatttcttaaatatttatatgacttaaatttctgcttagcttgcttaaataactattgccagctacctgtgcggttaatgcgccatgctggatgcctaaatgaacttcatgacgcttctttaagctgtcacgggccgctgcttttaattcctgttcagtcaatacagttatttctgaatcttcaaactcgctgctaagccaaaattccagctctcgattcttgatgcagcttaagatcctaagcatgccttctgctccagattttgaccatttcttgccttgccccttaacacggtaggtatacttgcggtggttgctctcgcagcagccaatggctttagtcacagtcagttttcgtttcttaaacggcttaatatcgtcccaatgacgatcaatataattccttaggcgccccagataatcatgattgagctcggtattcaattcatcaattagtcggctttctgcagtggttaggatagttttaactttgtcatagctgtatttgtattccaaagcagaaatcagcttgccttgcaggtcaggcgcaaaatatagcctttctttgattttcttatttaggtgaaagacatccaagaaatgctcatgacgcttgcatagccctacaatgtcatcgaagtctgttttggcatatccagcaccgccatcggcgttgctaagaattacagtatcagaaagatcataagtattggccaggtactccttggcttcgttcagcgcatcaagtcggcttaaagaaacaaattccttggcattgattcgctttctgcgtttcttgcttatattgacaatgccttcacagacctgatagcgatgaaattccaaccggcttttagtgcctttgatcaccacgccatcgccttcaagatacaaaactgggacctttttcttagtgcctgcggcatcatatcttgaatctgcttcttggcccgctttaatatttttcccggccatttttaccaaattgcccacctgcatatggctaatattaaagccagacaggcaattgactgctagagcagtattgcgataagtggcaacgctgcttacttctaagatgtttttgactgctaaaatactgtagcgcttgtatttgtcaaagcccattaattcatccaagggataccttgcttgtttgcctgggcagacatatcttcttctgacatacctaacttcgccaaaagccatattgattgagcgctcattcttcttatcaatctgatagccctgtgctttaaccttggtaatcatttcatcatcaactttagctaaagccaaggccatgatttccttaatcaggtttaagaagaaacagattatttttctttcacgcttaatataattatcttcagactttataatatttgcgatttcagttacaattgaattcataaaagaccagcttctaatgtgttttttgttcttaacatcagactactggtctttttgtttgagctcaagtccaaattcaaaggacttgggcttttttaattatttattcaacttaccgtaaaaaattatacacttagcagacaaaataaatgatttattgcgcaaagagctacaacaggctgttaataacttgttagaagctgaattgactgcctttctgggctatgatccctatgccagaaatggctggaatactggcaactctagaaatggtgcttatttccgcaaagttgatacgcaatttggcccaattgaagtgcaagtgcctcgggatcgcaacggtcaatttcatcagcacacgctgcctgactacaagcagcactcggatatcttggaaagcatgattatcaagctttactccaagggcgtgaccaccagggaaatagccgatctaattgaaaagatgtatggcagccattacagtccagctcaggtatcaaatatttccaagcagatgattccaaaggttgaggcttaccacaaacgcaagctaagcgacaagtttttctgcgtctatttggatgcgacataccttcctttgcgccgagaaacatttgagcgtgaagcagtctatattgccattggcatcaagcctaatgggcacaaggaggtcattgactactgcattgcacctagcgagaacattgaagtctggacagatatgcttcaaaacatgaaatcccgaggcttaaagcaagttgagctttttctttctgatggtgttgttggcatgaaaacagccttggccaggacttatcctaaagctcattttcaacgctgtttggttcatgtcatgcgcaatatctgcgctaaagtacgcgtcgacgatcgtgaaaagatcatgaacgaattcaaacaggtgcatcaacagacaaacaaagaagaagccacagctgtcctgcatgacttctataccaaatggggcaaggtttacagccatgttatcagaagcttgaaagacatagaaccagatctgctggtcttttataactatcccaagcagatcagagcttcaatttattcgactaacatgattgaatcatttaacaatgtgatcaagcgcaaagctaagcctaaggcagagtttccaactgaacagtcgcttgatgcttttattggcattcaggcaatgagctacaatgaccgttatttcaatcgaattcataaaggctttggtcaggttcaggacaccttagaatcctactttgattaaataaataattaaaaaatcaatttacgagaaagatctatttacacaaaagatttgacagtttcgataaagttgtaaatgtaccattaggaatataagtgtcaattaatccttgtacaaaatacgaactgcaaatactaatcaacgtcatcaataaagcagctactatgatatttctaaccaactttttctgtttaaacatataaggaaaaagagacaacagattattctttttttcttttacaggcttaaagtctgctttagggaccatgaataaagtaatcccagtccattctttttcaaatgcctttttagacatttttttaattccactggtagaatctggatcagcaacaattatctttcttttggtacttttaagaactacgtaataatgcaatagtcctccatcttttattacatgaacaataaaagggtattgaatatcactcatgtaaaataaggacatatctgctttaactgcttgaacattcatatcaaatttttcagcagttttaactaaacctagcgcagtagttccctcagtatttgttttagcaatatgacgcaaatgtgctatggatactcgagaatgatagttctttaagatcattgctaagcatgcagcaccacaatctgtttcatcaatttgtgggacatagattgatttgtacctaagcgaaattaccattttcttcttccttcttagccaatatctcagttttataattatattcagatagtaagtctttcatcttttgcacactagtacgtgaaaaatcctcaacatctccattaataaactgtacacgatgttgcttcaaatcaatcgattcaatattcttaggatttactaagcatgactgatttattttctctagcattggattttctttagcatattgattaatactacctaggagttgcatttctcctgttgttagaatcatcaataatttatgtggagtaactgttgttgaaatataaataatatcatcaatattaacgtttctagtttgtcgaccaatcttatatgaaaaagtcatcttcttcatatagttgaacttatgcaaattataaatggctacttcaattgtcttcaccatcgtgtgtctaagcttatctaaatcagatgtttttacaatataatcgattggaccaagacgtcttctaaatgtaattaaagataaatcagcatgactagtaacaaaaataatctgtgcacgttcatctcgcttcttaattaatgaggcaagatcaaagccggtatcattttcagtgtcaccacctaagtcaacatctaagaaataaataccaccatctaatttatgctccttcaaataagtaatagcatccatataattagtggctgtggcaatcgaaaattctacttcttcatcatctgagagaatcatctcggctgcaccaagaatttttttagtttgctcaatctgattctgatcatcatcacaaataaaaactggatatttcatttttagtcctcaatttcattttcatcatcaggcaaaattgttaaatcaaaagtaaaccaaccatcatcaacgtaataattgacaatcattacatcctcatatttatgagtaatttcttttacattggctaatcccaatcccatatgatgctttttagtggtaaagttcttttgactcattttatctgttgctatagtagcttctctaactcgattacggatttcaaattcaaaatcaccattttcttgataatacattgcatcaactcgagcattattagtactatctgtttctttgattaatgccatactttcctcagctgcattatcaaatgcaataccgataattctaactaagtccaaaatattaacgctcttaggaatttgagagatgttctgttcacaatcaaaactataatttaaatccaaactatataacttaaacagtttagcaattgcaatactttttaaatttttctcatggatatgatttacgcctttatattttcgaagagctttctgatcaaactgcgtattagtatattgatcgagtatctttacaactttcgtagtgtcgccctcttgagcactaacctttaagctatttaaaatattttgatagtcatgtttaaagcgacgtagatcatcttcattcttatcaagataacttgaatattcttgcaattgccgcatttcagactttaatttctgctgtttaagaacaagttctctattctctacttcttttgcttttctatctgcatttgctaattcaagttgtagcttttgttccttttgctcttgctcggttaaaagtttcttttgaatattaactaccgtcgaataagcaaatatggagaaaattatctgaagtattagtaaacttaaagatacttcaaataatgtcgtcatacgattaattttaactgtgaaaaaatagactatcattgtagaaatataaatatatgtagtcaactctacaaaaattagtccatttttattcattaataagttgtaaatatgacttttgttcataactatcagtagggcaaaaattattccaagaataagtgatagcaaataaacatcattactaaaaaagctaagtctggatccgaaaatagtcataattattgagcaaaataaatcaattaatccaaaaataagtgcagctccccaaaaaagctgaaactgtcaaatcttttgtgtaaatagatctttctcgtaaattgattttttaattatttatttaatcaaagtaggattctaaggtgtcctgaacctgaccaaagcctttatgaattcgattgaaataacggtcattgtagctcattgcctgaatgccaataaaagcatcaagcgactgttcagttggaaactctgccttaggcttagctttgcgcttgatcacattgttaaatgattcaatcatgttagtcgaataaattgaagctctgatctgcttgggatagttataaaagaccagcagatctggttctatgtctttcaagcttctgataacatggctgtaaaccttgccccatttggtatagaagtcatgcaggacagctgtggcttcttctttgtttgtctgttgatgcacctgtttgaattcgttcatgatcttttcacgatcgtcgacgcgtactttagcgcagatattgcgcatgacatgaaccaaacagcgttgaaaatgagctttaggataagtcctggccaaggctgttttcatgccaacaacaccatcagaaagaaaaagctcaacttgctttaagcctcgggatttcatgttttgaagcatatctgtccagacttcaatgttctcgctaggtgcaatgcagtagtcaatgacctccttgtgcccattaggcttgatgccaatggcaatatagactgcttcacgctcaaatgtttctcggcgcaaaggaaggtatgtcgcatccaaatagacgcagaaaaacttgtcgcttagcttgcgtttgtggtaagcctcaacctttggaatcatctgcttggaaatatttgatacctgagctggactgtaatggctgccatacatcttttcaattagatcggctatttccctggtggtcacgcccttggagtaaagcttgataatcatgctttccaagatatccgagtgctgcttgtagtcaggcagcgtgtgctgatgaaattgaccgttgcgatcccgaggcacttgcacttcaattgggccaaattgcgtatcaactttgcggaaataagcaccatttctagagttgccagtattccagccatttctggcatagggatcatagcccagaaaggcggtcaattcagcttctaacaagttattaacagcctgttgtagctctttgcgcaataaatcatttattttgtctggattgaatagagcttgagcaaaatctttggtaaaatcattcatgaaggagttcttctttctgtatgtgtttttttgttcaaaccaatcatacgagaaaggaactcctttttctaatgtttaaagaaataaatttaaggaatcattcatccttacacaaactattttacagtctcaaaaagcttgttagctttactctttctacttattttgaaataaaagaaaatacttaagatttccaacaaatctgacacaaattcatttatatatccacttgcatcccctaaggataaggctacaaataaaatgataagaaaaatatccgcatatttatatttttgtcttgcaacttgataaaagatccataaatcaaataaaggtgatacaacagcttgtgttaataaaagccacattagaacttcctactttagatgtaacatccacttaattaaattgtgtctatgcttacttgtaaagttagtaacacataaaaaactaacagtaggatcagcaaatccacccttaacttcaactaattctttttcatttaacttcttcacttaaacttcccacacgcagaatcgctccttttattgtgattctgcgttttttaacaaatataaaaggcacatgaccttttcattgctataattaaagtgaccaaacgataattctatgcatgaaaggcttgtgccaatgtctattttaccatctcctgaccaacaaaatgaacaactattttcaaactcaatcatcagcttcatcaagaagtttcaggtgatcaagctgttgagaaaatgtggcttccgcaaggaaaaaggcattagcctgttcagcttgtttctttacgttttaagcaatgtctttcgtgaccgcagcttatatatgcagctgaaaacggatcattttaaagaaagcttttctaaaaaattcttattaccgatttatgcgcaacgtccacgtcaattggctccacttcaccacactgctttctgcgcaaatcattaataaccacttgcgatctttgacttcagaaaaacgggctgattgctttgttgtcgatgattcctacttctctaggaccggcttcaagaaaacagaattagtcgccaaagtttttgaccatgtatcaatgacttacaagaaaggttttcgcatgatgaccctgggctggactgatagagcttctttcatgccaatcaattcggtgttgctgtcctctcacaagctacagaatatgattggcgaaaacaaagtctgtgatcagcgcaccattgctggcaaaagacgcatgcttgcccggactaaaggcacagacgtgatggttaatttaatcgaccaagctatgaaagcaggtcatcaagccaagtacgtgctgtttgacagctggttctcaaatccacatcaaatcgtccagctcaagcaaaggaagctggatgtaattgccatggttaaagttagctccaaaatcaaatatgaatttgaaggagaacgcaaaaacatcaaacagatttatcgtagctgtaaaaagcgacgcgggcgttcgcgctatctgttgtcaattccagtcaaggttggccgccaagacaaagacggtgctaaaattgacgctcggataatttgcgttagaaaccgtgccaatcgtaaagagtggctggctattatttgtaccgacatgtcgcttagcgaagatgaagtcattcgcaattatggcaaacgctgggatattgaagtttttttcaaaacctgcaaaagctacctaaaactaagcacggaatatcatggtctgtcctacgatgccttgactgctcatgtggctatagtctttacccgctatatgctcatgtcagtagccaagcgggacgacgaagatgagcgaaccttaggtgagcttttctattgcatgattgatgagctggcggatattacattcagtcattcacttcagctaatcacaaaagcaatggtggctagcgttgaaaaagtctttcatgccagtgaagcacaaatagcagaattcacggctgactttatcaatcgtttacccaaatacatgcaaaaattgttaaagaaaactagcaaaaatagtatagaagcccaaagctaagcaatatcaaagaattgccagcttatttgatgtgggaagtttaagttcttcataattcaaatcttcctttcaactctttaactttttacatcaccaatattactatgcattcaattttatacacaaagtcgtcatattctgtactattttaatcatattctgcatttttatttaaaaagcacctccaccagaaccatttccataaccatacgaattatttttaaagacgcggcgtctaatttttgatcttccaccaacaactttcttcaagactagaatagatagtttttgcataatttttcctctctttttctcaaaaaatactatagaaaaacatacacccatttggactccaaaaaacatttcatcatattctgcctcatttcaatcatattttgcaaaacatcaagttactcaatatgagacgcttctttcaattttatttaaaagatcactacttcgagtcctccatcttttcggtatcattttagctcatttgataccgctaaattaataatgataccgattaaatactaaaaaagactgacaattcatttttacgtggattatcagcctttttgattactcatgataaatatcttgaaccgccataccccaatatggaatatattccatatatcttttacttgcattcttatcatatggttttattaaatacgcttctaaacttgatgcaattgccttagatacttgagaagcatctttatctgataaattaaatgttttacgaattgaagagttactaatcttcatgtcatttacatatttcaaactagcatcccagtaaattgattcattcttttcagtaatagccaattcactaaatgctttttcctcacgaatagttacttgcgtagcagtggtacccttgcttaaaatttcgaccgttggtaaatgagcctcttctaatgaataaaccactttatcaattccagtaccacgtgattcagtaatatgaaatttacttaagatattagccaattcaggattacgggatcgaggtgggacgtctaaaaatctaagtggttcaatcaaaggaattcctggtgctgtgcttgctggtagtattgatttatcatgtttgaattttttaagacaccattatatacaaatttccagcaccaaaatcagaagatgtcgtcactgctatcttatgccagctaacattgccattcattggttgaggaacttggctctgtatcacctcagaaaaatccttaatttgatgtagattcaactcatttttacgtgaattatcagcttttatttatatctaaatcattcctgcaattaaaccaactacatataagaagacacagcaaactactaaatacaaaccgccccacttcacggtctctttcagtatttcgccttcatcaccttcgcggttaattgaaccagttgccacggcaatattttgcggcgacagcatccctgccgttgcgccagtcatgttcgatgctacaacccagtacttacttacacctaggtccattgcagccgacagttgtaaatttccaaagagaacgttagctgaagtggcagaaccagttaagaatgttcctaatgccccaataagtggtgcaaataatggataagctggccctaataagctaactaaggccactgctaatgcatcggtcattcctgcatagaccattactttggctaatcctacaattgcacaaaccgtaattgttgtcttccagacgctcttaattacttgtcctaaaatttgcatcattttcttaaaactaacgccctgaattgccccaccgattaaagtagcgacaaaaagcaatgtacctggagacgacaaccagctaattgacaaggtattcggatttttccccgtataaacaaccaaattagttgtcaccttattaagtaaattattaactgctggcaccaatgatgatgcaaaaataacgaagatgaaaactaagataaatggtgaacatgccttgagcatttctttagtacttggtttttctacatcaggttcttcttcctcatcatgccatctagttaataaaatcgtaattgcgattgaacaaagtgccccaacgattgctggcaattctgctccaacaaacttagccgcaattacttgcgggattgccatgcctaaacctgacatcaaggtaattagtccaacgcctttaattgctttaatagacccttccgttaaaattactaggataaatggcaccagcacaactaaaacaaataattgcaaggtcacgatgaaggataattcttcttgctttaacccagtcacttcacccaaggtaatgatcggcaagccaattgcaccaaaagctgtggccgtggtattagcaatcagactgattactgatgctctaattggctccaagccaaaggcaatcaaaatcccagcggcaatcgccaccgcggttccaaaaccagcaattgattccaaaaagccaccaaagccccaagcgataatcaaaacaataatccgcttgtctgttgaaatcgtcgccagcatatcttgaatggtcttcataccacctgattcggtagtaacattatacgcaaataaggccatcacaattacgaacatgatcggccaaatgcccatgataattccttctagcgccccacttgccgtatctagcaccggtaatttaaaactaaagactgctaacaccatcgtcaaaattaagccaatgacacaagcgcgtgcagctggcattcgcataactcccagcgaaataatcaaccaaacgatcggcaacaatgcgatcgcaaatctaatccacatcaaagtcctccatcatcaaaagtgttgtactatattatttaatcatgatttgggtaaaaagttaaaataagacacaaaattttagttaaaattacaattttcacaaatttcacttgcaagttttaacaacaaactatataacaattaatggaaagtaaaatttctcacatcatgtttgaactactccgtggaatagagtagttctttttttgcgtaaaaaaatagccagaccgaattcagcccaatgtcattaagttaagacattgacaaattatcgacttggacttttaagatcattcatttgcgatttatcgcatttgaatgctcttttttcatgccaaataaacccaaatcttgtttagaaattaggctacacgatataaataatatacagctgatttgggtttgagatttcttttgtcttttcgtcctggtctgatcggaattgtgtaatgactaatttgaataagaatctttttaaagatttcagttgaagaagaaattatatacatagcctggatgacaaaacatgactgtttgaaattgatcgcatattgatacttgcagtttttttgtggtacatatgcttgagcatcaatttgactgactgcgttaaacataatcatgtgggcatagatctccatttcaataaatctatcctgcttggaatgaaactgtacgctacctaaagcatatttcaactttttgaatgaagtttcaatgccccagcgcaaatggtagatttctttgatcctttttaagggataatcggctctatttagattagttagaacaactttccattcttctttgcctgatttaggatcattaattctaaatttacaggcacgaaattttattgtacataactctccaaagtcccagctgccatctttggtatttttagaccgatattttatatattgacggtaatgatggttaaccaaatgaacgttttctgtagccttatgggtttcataataataattagaggtagtcacccagcaagctatatccttatcacactcttgattaggcaactcagctacttccttaaatgcgccatatcccgttttagtacgtatgacataataacagttaggcaggcgattacaattttcaatcatgttaaagccggtataacctcgatccatagtaactatatatggtccgcaatttagctttttaagcatttgaacggcggctttacgttcatccatctttgacttaggctgaaagatgcagtcttgataagtattatttaacaggtcatagagtgcattaacatgaatttggcaatatggctttcctttatgattgagatttccaacgatattctctgatttaggattccagatttgattaaaatcagacccatcaatggcaaatatacgatatttatgatcaaataactggatattaaataaattctgattaaatacagttagaatatgcttaaaacatgcgggtgaaagctgacctttgcgttggacataagcggaagtactgactactttatcgttatttttaatagctttttggccaaaagctctaaacaactcactggtcaaatcttttccttgcatattaatagtagttttaatgactgtagctgcatctaaaaaccgcttcctagtgaaggcatgaggatcatcgataaaatcatgaatatgctttccagtatcattgataatttgatcaagacgatctaaaatatttctgtgaagggctttcaaaattaacaccagctttctggcaataattttgaaggtttaataatttaatcagagggcgaaaaggtaggttcttttcgcctttattttatgcaaaaaaaagaaccaaatcataatgattcggttctacagagattagattcaatttgtcaatgtcttaacttaatgacattggaattcagcctgacttctgttttttttagcgatgtttaattacgtgaataccataagcgattaagtaaattaccacttcgatcgttgcaataaagaaagttaccggccagttggtgataaagccgagatacagtccagcccacacgccaactaaagcgaaaaacacggaccaactgatcattgctggtattgttttaccaatatagcgcgccgttgaagatggcaatgttaatagaatgaagactagcaatgaaccaacaatctgggcaccgatagcaactgacatagccaaggctaccaagaaagcaataccaacccagccagtatgtacaccatgtgcaacggcaccgatatggtcaaatgagtcaaaattcaagcttcgagctaccaaaataattaatagtaaaactagaattgacaaaaccactagctgaatcacgccttgtttatcaacaccgatgatactaccaaacagaatattagtagcgtaacggctatttgatccagaaatggctaagaacagcacacctagcccaataaacagagctgagatcgcactaactgacgattctttttgatcgctgtgcaaggacaattctcctactccaattgaaccgagcaaggtaaatagtagcatcccccataacggtgcaatgccgataaagacggcaaaagctgctccagcaaagccgatttctgacagtgtgtgagctaaaaaagcataactccgtgctactacatatacaccgaccacgccacaggtaatcgcaatgaatgtactagctaagaaggcataacgcataaattcgtattgaaacattattcgaaatcctccttaaatttatccatctttccttgcctgatcgttcccttatttaaatatagataatcagtcatatactttttagctaaaggaatatcatgagtgacaaacaaaacggtaattttgtgttcacgattcaggtgcttgattaatcccatcaattcttccttagcagccggatctaggctagctgttgcttcatctaagatgatcatattgggatgatcaagtagagcctgcgctaaatatgcacgttgtttttgtccacctgatgcctcacccattcgggtattctgaatcttttctaaatgagtttcttctaactgatgatcaatctgttccttaacctttttggtcttaaacaatggggcgttaagtccaataaatgcgcgaatcgacaatggatactccgcatcaatatttctaaactggggtacataacctaacttaacgtctgaatcaaacttaaagttgcccgcagtcggctttaacatccccattaaaatcttaattaaggtggtcttccctgttccattaggtccaagtagtgcagtcattgacccgtcttcaagctgaaaactcaaatcttgaaaaacatctttagtatcaaatctcatcgagagatcatttacttctaaaatcactcttctaccccctccctaagttgctattatttttctattttagccaaattttgataattttctttcatccaagccaagtaagtagtgtggttaggaatagtctcccgcacatttaacactggaatattattttccttagctaattttacaaatgacttcacagttgaactgcttgcctgtgtattgttaacaaagaatgcaatcttttttgctttaatttcattattcatttgattaatcatcttaggactcggatcagtaccattctcaattgcttcttcaaagcccttatccccaatcttgtatcctgcttctcttaaagcataatcaaagacaggttcactaacaaagactggcttactatttttcttattagtcttcaccaattgcttaacttgattaatcttagctaaatacttgtcaccattagctttaaaataagctgcatgctttttatcaagcttagataaacgcttaactaggtaattaacatacttggttggcatacttagattgtaccaaatatgcggattatcccccttctttaatcccatcaagtcttcaccaactaagacaggctttttgctaacagaactagctagcttattcatccaagaatcatagcctaagccattagcaacaataatatttgccttggtcaattctttagcatctgccgtagttggttcaaaatcatgaggatcggtactgctattgctaatgattgccttagccgtaccatattttcctacaacatttttagcaatatctgcataaacattggtggtggtaatgatcgagactttacccgaattgctcgtcgaatttgatctattcgagcaagctgaaactaacagcgcaataacgccaattagtcccaaaaaagagattaacttcgtaattgtagatttcgcattttgcataaaatatcctccttgtgcaaaataaaaaagcatttaagttagaaaattcagcataaattctaactaaaagttagaataatctagttaattacatatgtcaacatatttttgcatagacaaatagcaccagtctcccataagcctgatgctatcaataatttaagtcataaaattttgctgaattttattaaatgctttgttctaaaattacattattatataaacatatttttatataattgtcaaactaaattaaaattcttccttcacgtgctgacgcaaaacatctaagattttaatcacatgcttatcttctaagctataatagcgctcctgcctaacccgctcgctcttaactagcttagcctcttccaaaatacgcaagtgacgcgaaatagctggctgactaacatcaaactgcttaactaaattattaacactacttttttgattatcatttaaataatataggatttgaattcgaatcggatgattcaacgctctagtaatccgaataatttgctcgtccaatttcttcacccattcatactttttaatttattatagcttaaatttaggtataaaaaaacgctacccttcgggtagcgcaaaacataacagagtatcttgatttaagtagagatcatcaagatatttatattataatacgtttttgccaaaatgtattgttttttgattaataaccagaattatttaataataataatattcgatattacttatagtattattcgtttgggtcttctttgacattcttcttccagaaactcatgattaaaccagcaacgattgaaccaataatagtagctaggaagtagaataagatgtggcttggaccaccgatgttaccagcaagtggtgatacccaaagaccaccgtgaggagctgggacaccaacgtgccataaaccaactaaagcaccaccaacagctgaaccaatgatacatgatggaattacacgacctgggtcagcagcagcaaatggaatagcaccttcagtaatgaatgagaagcctaatacccagttagaaacacccgcacgacgttcttctacagtgtacttgttcttgaagaatgtagtaccaattgcagtagcaaatggtggaaccataccacccaccattacagcagccatcaagatagcagcagtagctgagtgagggtcgttagcaaatgcacctgaagcgaagacataagcagccttgttgaaaggaccacccatatcgattgacatcattccggcaaggatagtggtcaaaagtaccaagttaccagtacccattccgttcaagaaatgagtaatagcaaagttaatgccactaaagattgggttaatgatgtagaacataattgctgcaataaagagcaatcctaaaattggatagaacagcattggcttcataccttcaacagaacgaggtaatttagcaaatactttcttcaaaccaaccatcaagtaaccagcaataaaaccagcagcaataccgcctaagaagccggctggtgaagttgcgtgagcttgaacgttaacttggaattgaccgttaacaatagaggccatgtaaccaccaacaaaacctggcattaaggctggcaaatcaccgattgattcagcgatataggctgccaaaactggaaccatgaaggcaaatgccaagttaccagcattgtttaaaaagatgaaagcaggagtcttagcgccacccatgtagttttctacgatgaatgagatcgccattaagataccaccaccaataacgaatggaagcatgtgactaataccattcatcaagttcttgtagatacctgcccacaaacctggcttctcagttgatgaagattcagttgacttgtcttgagcacttgcacggtaaacatcagccttaccacccataatgtcatcaatcaattcgcctggcttgttaattccatcaacaacaggacggttaactaagtgcttgccgtcaaaacgtggcatatcaactttcttatcagaagcgataataacacctttagcacgcttgatttcatcaggagtcaacttatccttaaccccttctgaaccgttagtttcaattctaacttcgatgccgcgcttcttaccttccttaatcaaggcttcttgagccatgtaagtgtgggcaataccgttaatacatgcagtaacaccaacaatcaatggcttgttgtcgtcatcacttgtaccttgagccttagcagcttccttagccttcttagcttcagctgccttcttgtcttcttcgtcttttttagcttcagccttttcaaaaagatcgataacttcttcaggagtcttagtattcttcaaagcttcaactaaatcaggatcaattaacaaacctgaaagttttgctaatgcttgaaggtgagtattgtcagcaccatctggtgcagtaatcatgaagaataagtgaactggttgaccatcaagtgaattatagtcaattccttccttactcttggcgaataatacgcgtgccttgttaatagatttgttacgtgcgtgaggcatcgcaattccgccaccaataccagtagttgattcgttttcacgtgcccagattgacttaataaaagcatcttcgtcgttaacgatatcagttgctacttcaaggtcagccatttctttaatggcatcttctttgttcttagccttaagctccataatcatggagtcagggcttaaaatatccttgattctcatatttttcccctcgttttttattaagaaatttgctcaactttgatttgtggaagaacagcatcaatttggctcttaactgcaatgtccttagtaaaggcagtagcagcaccacaagccattccaattctgaagccttccttaggatcttgggtcttgtagtaagtaccaacgaagccggcaatcattgaatcacctgcaccaactgagttaacagcagtaccaacagcacccttagcatggtaaacatgatccttggtaagaaggaaaccaccttcaccagccatagaaaccatcacattttgagcacccttatctaaaagcttttgtgcgtattcaagcatcacatcacttgaatcaaaagttacgccaaacaagtctgctaattcatggtggttaggcttaattactagtggcttatatgccaaagtatcaagtaaagcttgtccagtagtatcaacaacaaattctgcacctgcttctttaatagtaggaagcaatgattgatagaaatcagttggaaggcttggagtaagagaaccgctcattactacaatgtcgcccttctttaaatcgtttaaacgatccttaaaagcagtgatttcttggtcggtaatgttaggaccagccgcgttaatttcagtttccttttcagcgtggatcttaacattcacacgagtgttatctgaaatagtaacgaaatcactttcaattctcttttgattcaattgacgaaccaattccttaccagtgaagccacctacgaagccccatgccgtattatcaacatttaattggttaaggatttgagaaacgttaattcccttaccccctgctaaaaatgaatcattgttagttctgttaacttctccgcggttaactttttctaattgaagaacatagtcaagcgctggattaacagttactgtataaatcatcctattttgcctcctctaattcaataccgactggtaatgaccgtttttgacctggttttagttgatcagttaccacaatcacgtcacttgtattggcaaacacagcaaagttacgctcaccgattttactattatcagttaatacataagcgtgtcttgcctgtttgatttcggctgccttaaccgcagcttcctctggatcaggtgtagttagattgccatttttttcaattccattagcaccaacgaagctagctgaaaaattcattgccttaatctgacttaaggcggtctgacctataacagcatgcgtatcgtccttaacttcaccgccaattagaattgtgttaattccgtgatttaaactgcataaagcagtctctacaccattagtaataatcttgacgttagcaacctctgctaaaaatggtaccatctcataagttgttgttcctgcatcaatgaagacattgtcacctggacgaacaaaattctgcacggcatatctagcaatagtgatttttgcgtcatgattcaaactgaagcgaacgttttgtgatacatcacgagaaaaatgtttaactgattgggcaccgccatgaacacgcttaaggatcccatttttttccatctgaattagatctcgacggatagttgattcagatgttgcggttaagtcacataattcacttacgcgacataactcgtgttgattaacatagtcttcgattaagctttggcgctcctgagtcagcatcatttctcacctcgataaatattgtattcgctttctcctccaaaatcaatcatttttcttcaaaaaatgtcatttttatttattatcgttcaataacattcatttatatgcaaaaaagatgccgttttttgattgaaacgacatcttttcttcgtcatttggaattattcttagtcgttttaccctatttgactaagaatccgtaaagatgactaagaaagagaaccaaagatctattaaccttgcaaaagcaaaacacgctgaatcattattgattcagcgcgttttactattaaatatattttgtctagcctctcaagctacgcttaaagttttgccatgggccgacatcatctgtttgcaaaatcaagtttggatagatttttctaatccagataaatgacgctactgtagcggctaaagcaattaaagcagagatagctgcctctaaattagttgcgttacccataattactctagctggcattacaaatgatgatagaaacgggatgtacgataatactttagcaaaaatcgtatccccacctgattgcatattgactgtgaacaagaacccgatcaacatcaatgtagatagtggtcccaccgctttgttggcattctcgcttttagcaaccaaagcgccacagaaagctgcaaagataataaacaataccaagccgattatcgtaaacaccaatccccaagaagccagattgccaattgcttgatcaatcatcggcttatactgtctaaataaatcgctaaagccatcgatgtatggggccgcgcaataaactgccacaaaaccaacaacataaattaacacttgggtgataatttcaccaaaaatacctaaaatcttcccagtgaaataatcgccacctggcatactcgaaaagattacttccattatcttggtacccttctccgtagcgatatcttgtgctgttacttgcgtataagtgatcacaagcatgtacaagataatcagcaaaacccagaaggaaatttgcttaacaggatcattatcaaagctcttcttatcaacatgcttaacttgttgcttaaattgcgctcgcgtagctaaagactgagtctgttttgtcgttagcttggccttacttaaattcaattgttgctgggcggtgtttaggctagttagcagctctgattttagatcactgtccattttttcatcactatagtaagttgcagctaattgattattcttttgttcaattaaaacatagccatcgatatcttcatctttatacgcctttttagccttagcttcagtgctatagttgtcaaagtcttctgactttttaattgcttgctttaaggcagaattagaagtaactaccccgacatagttgtcatcactgccgccagctgataccattccgataacaaatgaaaagaagacgagcagaaacggtgctaaaatcatcagcaaatatgaccaagttttcacttctctacggtaggtttcttttgcgacaagccagatcttattcatgacgcgcacctgctttcattttgaaaatctcgtctaaagttggaggttcctggtcaaaagtctggatatattgaccggccgaaagttggttaaaaatatccttaccatatttttcgtctgcaagaataagcagcttcattccattgttttgcaaaattatatcttttacacctggtaaggctgataattcagtagcacttttgtctgtcctgacaaaaattcgagttaggccaaagctgttcttaatttcatttactgggccattcaagacgatatgcccatcattgatcattacgacgtcatcgcacaattcttccacgttacgcatatcatgatcagaaaaaatgatcgtagcgccttttcttttttcttccaaaatcagctgcttcattagatcaacattaacaggatctagtccactgaatggttcatctaaaataatcaatttaggttgatgaattaaagttgcaatcatctgtactttttgttggttacctttagacaaagacttaatcttatccatggggatccctttaacagccaaacgtgataaccaatcaggcaattcttcttttacctttttagccggcatccctttaaggctagccaaaaacactacctgatctgaaatagttaacttaggcatcaaacttcgctcttcaggcagatagccaatattgtcataatctttagcgttgaaagaatgtccatcaatactaatctggccgtcataatcaacgaatttcaaaatactatgaaagatcgtcgacttacccgacccatttttaccaaccagtccaagaatacgcccatctgacacactgaagctaacatcaaacaaaacctgtgttgacccgaagcttttatttaggtgttctatttttaacataatttttcctcaactttttatctaatggttattagacctagaagtacaccgtcaaagaactgccataaagtatcggttgaaaaaattgtttttacaatatcaactgacccccaattggttactaaagtaatcactacaccagctgaagcaaccactactcctgtaccaataacttgaggggcaagtttcaacactttcttctgccatggaatctttgatgcgaccgttttattaaggactaagcttgcggacatgatgccaccaaacattagaccgaaagccaatccggctccaatcgacataataatttgaaaaggttgaggcgaaccagcagtcttaacatacatcatcacaagagctaatattggtccaacaagtgctccaattcccatgccttcaataattcgtttgttttcacgagcaaatttttcattattcattgttcttacctcaaggaaattttcagctaattaaacaaatccgaaaacttagtcggaatgttgttcttggcgaagtatttcttgaatgcatccccaaaactcaattgatctttttctctattttcaagcaaatcatgaacagctaagaatgctgtaacggcgtaattaacggctaaaatgattaacaaaccgagcacaatataaattaagtacagcattgttctttcctccaattcagcgattatctcccaggaaataatcttttatccttttaaattaatcatatccccatcatttatgtaaaaggtaaaaccgtccaattctgtcatttttcggactgattttgcattttattcttcatcttttttataaactaataaatcccctggttgacaatccaagacttcacagatcttgctcaacgtgtcgaagcgaacgccatgcgcctttcctgtcttcagaatcgacaggttagccggcgttataccaactttctctgccaactcctttgaagacatctttcgcttcaagagcataaaatctagtgtcacttcaatcatctatatcaacctttctaaataatcgagtctgcatcctcctgaaccttcattccgtacttgaataccaagtagactacgtatagtactgctaggaaaagcaaaccagttgtcacaccacttgggtatagtacattattcgaggatttagcgaaccaagtgcggtgagttatgaaaataatgtaatctattattgaaataagggtatatccagcaactgaaattaataatttcttgagtaaattcaaattactatcagcaaagtaaacttcttgcttgatattcttaacaattaatctggcatatcgacagattaaaaaggctgcaacgctcatcatgatcagtgatagcaacacaaccactattgcaccgatatagttatcaactgatacgccttttatacccctaccactttcaaagccagcacgaaaatccggattatgtataccaaataacacaacacctcccataacgatccacataattattcctatcacacaaaatatttggtaaatccaagcaaaaatcgtaagcaaattcaaaattaattttttcatttttctatcctctcaaaatatggatgattctgtatatagcactgccaattacacccgttactccaattactaataatgtaattctaagaacactccatgttccgcctaagttagcaaacactaagattgccatcattatcagcattccaataattgaacctatctgtcttttcttttctggaagcatatctatccctctcttccataaaactatctatctctttctcgtcttttataattattgtattacgataatttataattgcaatacagaaataaaatatttttttgggataataaaaaaataccaaattagtcgttaaactaacttggtattatgttttatcttccaagctactgctttttacttttcttcttatagtaagagttcatgaaaatattcataaagataacaaaggctacactttcaactatattccaaaatactgttccaaagcttaatgttttgtactgaaaatagtcccataccaatcctattaacagggccaaaataccagcgatgatacttctgtttctaacttggcgctcggttaaaattttatttttcataatttttaccccattattatcatatcgaaaaataggaaatctattaaccgaattttctattttttaatattatctatgtttatgttttttatgtctattttgtttggcgaaatctttaacagcgccttctacacatccttttatcataccacttccgctagggagcgcatcaatgaaacccgataaacatgatccacctacaccaagccagttagtgccaccacttactttttctaattctttataattcatttctttcatcataaaagttacctccttttttacaaatgtgatacacaagaaactgatccgctaataatacccacattagcaccaaatatagctccacctactgtaccaattggagtaccaaatgcagtgcctgcaatgccatattttagtccatccttcaacgctcccattccaatagctttagcacaatttgtgatttttctacggcgtcttgctttaccaccgttaccaccgaaaacagctgacagttcttcataagttaaagtttcaaatttgttcatgtttttcccctttataaaacttctaattacaattttcataagtgaattaagttttacctctcttcaacttacacactaataatacaaaacaatttaccttcattggcgtataataccgatttagcacgaaacaagatctatttggaaaatatttaccaaatcggccaagttttcgtatattagtaatttacaaaggattcttattaattgttacgctaacttgatattctgttttataaatccgaaaactagtaaaaacatagacacaatgcacttattatgagaatggctaacaaaaaaatcttctcatagccaaggctacaagaagattgccatcacattaatgcataaactgatacgcacgctctttactttaataaaacatgatcaattatacgactataacatagccactcaaaacccaaaacttgagtcgaaatcaaataatcatttttagcatagtaacctacgaaaaaaatcacaagtttcataggtttctttgcgttatcttctaagtattacgatattttctattggagatatttttagcctattcgcaccagtatttttttcaatacttatctactagttattatctacctctatgaaaagaactttggaaaaacttaggattttccaaataaacgtctcgtttatgattaccacctttcttactgtataaaggtagcatgtgttcagtatcagttagaccaatatcatctacagaacctgacccacctaaaattccgcttaaaagtacttcatctttagaaataatgattcgtttcatctacttttcctccttagttttctttcctaatgaaatgcccaaaactaaactgattaagatactaatcattccaattaattgaccccagatattatccttctcacctgtagatggtaaagactgagtagaaccatttttaatagtgtcattttccaatcgctttaacttagtaattctattttgattgttcttaacggcactataaggcttgctttgcacttttactgaatcaaattgtttattttctttcacacttccgtgtttttcactaactgctgctagaataatattctttttatgcgatttagctgttttcttgaccttagtggctacgattttaggttttactggcttcttcacagttttcttcttagtttcagctctaggagccgcatactcttgattacctgtcgtaactttagtcagatctgcagtagagctagcaacatttgcagcattctcaaatacgctattttcaacaaagtcagtaatagcaacgtcattgctagactgtgtttgatcatcttcagctacagtcacttcaggtatttcattactttcagattcagtagtattatcatccttcggttgatccttaattactgcctgttccactaatttattagctgcatcagaatacaaaaagttatataactcttgtcccgtcttttctccaccgacccatgcactaataatttttccattaataaatctcattgtagttggagtacctggaataccaatttctttgaaggcatactcatgtgctccttcttcagcatcaatattgaaataaagcagcttacctttaacgatttcattgaaatcttttaaatcaggtgaaaattgtcgacagtagtaacatgttggacgaccgatatacataagatgttcttgattatttttctctgctagaagatcttttacttcttgcatttttactctatgaaaatcttttacattgttctcataatcttcaacagatacctcatcttcatcatcttcactatcttcctcatttgcattattaggatcttgattattagtattctgtgactgattattttgatcttcagaagctgctggctcttcttcctgcttattttgagtttgagctgcttcgttcttactactagttttctgctcagattcggaaacatttttatcatcattttctgttttagatactacttcacttttattctcttgagaagtattaccttcatccgcatgcacaatagtactattcatcatcaataatactgctgggctcaacattaacattaatatttttttcttattcatagatcttcctccgtattttttataactaagaaaaatatatcaattatcagctatctttttggttatcagacttattcagtacactttttgaccaaatcagttatcaaaataattggaatttgattctaactaaaaaagagcttttcagctccttttaattttggttaagaattttatccttaaaatattcaaaatatgtactcttacctgtaataatagttgcgttgccttccatcccatatttcaaatttttcttggacttggccttacagattacttcatagacattatttccgcgtagattaatgggatatactccaatttctttcacttttcctactaatctatccattgttccactagcattagctacctgaaaatacagtgtttggcctttttttattgccccaattttattacctgggaaataagtaactacattgaccgttcttttagccttaatcatcggaaacaagtgaactgtattctcctgtttatcatcaagatgaactagccatttttctctatttcttctaacaatttgtccttcatgatagtttctattggcaatattaagtgtattttgtggttctacaattccggtagatgtaactgtactttgtctagttgcaaagaaagaaccgactattaagatcagaactaaaattgccataggaataataatcatagttgaaaaattcttgaatttataggaatagtattcggtactctcatagtctttattattcataacgttgctcctaattctcaactaagttatagtaaaagccatgtttctgcattaatttctcatgacttccttgctcaacaatttgaccatgatctacaaccagaatattgttagtcctttgtgcaattgctaaacgatgagcaataaaaataatagttttatcttttaatttcattaaattatctactacttttttctctgtaatcgtatcaagcccgctagtggcttcatcaaaaattaaaattttagccggtgacaataatgcacgtgcaatagttagcctttgcttttgcccaccggataaaatcttggcattttcatccatcttggtttcaaactgcagtggtaattgttcgatttcagactcaatttctgctatctgacaggctttcaatatatctttttctgtaatatctggtcgactacctaagagcagattttctttgattgttcctgagaagatgtatggtgtttggggaacatagtttacgtatgaccgtaagacatgcttatctactttagtagaattaaatccattaaaagttaacttgcctttgcttggagagaagaaatcaactaaaagtttgaccatagtagacttacctgagccactcatccctacgattgccaacttatcattgggttcgatttttaaattaatatcttttaatacatcgactccatagccataatgatagtcaacatgatgatattcaatctcacctgctaattgcttggcatccctaatctgagcatctttctggaactcactcttaaccatgtatacttcattcaatcgattttgtgctacattagctgattgtagagttggttgaagattaataatgctctgaagtggatctacaaaatacgatagtaatgcgttgaaggtcattaattgaccaatgctcatctgcccgttcattacaaccttagcccctacccagaggataattacattgagagataactgaatgaaggtctttaaagctgactgcaaagattcagttttactgtaacgaaaagatttcttgaggtaatcgacgaattgactatcaatcttacgataacgtgtttgttcgctatttaaagctttgattgtttcaattccttgaatatcttcaattactgaagaacttaagacagcattactctccatctgatcattattcatcttttcaaatttcttagaaaagctaagaatcaccactgcataaattggcaaagacagtagagtaatcacaaatagagtggaattttgaattgccaaaactattcccatcacaattacaattgaaagatcaagaaataatgaaataactgtactggcgagtgcgtcaataattcgactagcatcagagaaccttgaggtaatttcccctgttctacgagttacgaagaattccattggtaattcaaaaatatggcgaatgtattgtaagttaagatcaatacttaatcgctgacctagaacatccaatagaaaattttgcccgtaagaaaagatagagttgaaaacatatgctatcaataaaccaatagctaggatcgacaaagtttggtatgtaccgctaggaatataagtatcaattaagccttgcaagaagtatgagctacaaatactaatgattgtcatcaaaagagcagccaaaataatattagtgactagtttcttttgtttgaacatgtatggaaatagtgaccacagattttgctttttctctttgagtggctcaaaatcatcatttgggaccataaaaagggcaattcccgtccattcttgagaaaacttttctttagacattttcgttaaaccaacgctaggatccggatcagcaatcactaaataatttttggttgccttaatcacaacataatagtggagtaattcgccttgctttaagacgtgtacgatgaaaggatattgaatgtctgcatcaggatcaaacaaggacatgtcagctttaactgcttcagtttttagattaaatgcttgtgctgttttaactaagcccagagcggtagtcccttctaaattagtgcgggctgaatgacgtaaatgggctaaaaatactctagaatgatattttttaagaatcatagctaagcatgcaactccacaatctgattcgtctacttgtggtacataaattgatttatactgtagtaacatcttttccactcctcatattaagttgaatccattatttcatgattggaaaactaaatgtaaaaaaataccaaatcggttattctcattaccgattcggtattttagttttctaactagattgagctactcaactttaatattttcaaatttatctacaagctttttaaccacggctttatacgatctagaataagttaccatctgaccattatcaaatataataatgcgttccttcgtgtcaattgcactaatgttcttaggatttaccaaagaagattgcgaaacttttgccaagaatgggttttctttatcaatctgagtaatatttgccttatactcaacttctccattctcagtaaccatatgtactttatgctgtgtagtactgtgttcaatgaaaagtatatcgccttcggccactttacatacgcgccgaccaatcttataagtaaagtcacgttgactaaacttaattctgttagataaattatcgaaggcgttacgtaacgtttcttcgatacgttgaataatcttatcagacgacatagacttactaatataatcaattgcaccgatacgacggcgatacgttaatggagcgtacttatcgtacgccgttacgaagatgatctgggcattttcgtcattcttcttgatgaattcagctaaatctacgccattcttagctttagactctcgacttaattcaatatctaagaagtagataccattcttaatatcatttgtgactatgtatcctaccgcttgagcaaaatcgttagcaacaaacgtaacagattcatttaattcagcgtaaccttcattatcatctattaagtcttgaatagatgcattgatattcttagccatctgattagctaaatctttatcgtcatcgcatacaatgattgggaacttactcatcctcttcaccatcttccgtatcaattgtcatataaaagtcgaaccagccgtcttgaattgtataagaaatagacatatcaggatatttactctcaatttccttaatattagctaatccaagccctttatggtctttcttagtagtaaagccacgttgttgaatttgactagttgagatatttttattttggattttatttctgatttcgaactcaaattcatctgggtcatcagaatagaccattatttggacttcagcacttcgaatatcatgcttttcggcaatcaatgctttactttcctcaattgcattatcgaaagtaatgccaataatacgtactagatcgagttcatctacatggtctggtaaattacggatattatttcgacattcaaaattatatggtatatccaaattatacaattctgttatctttggaataataatgctcttaattgatttaacgtaaatgtgatttaggtctttatatttaagtaaggctttagaatttaggttagtttcagtatatttatctagtttctgaattacttcttgaacgttaccttcttgcgcacttacctttaaagaattaagaatatttttgtaatcatgtctgaaggcgcgaagatcatcttcacttttttcaagataagaagcatattcttcaagctgatgctgctgttgctttaatttttcttgatcctttttatttaaaagtttttcttgtaccatcgtcatttcatgatatataaatatagcaaaaatagtttggataagaatatagagagaaaagaacaaagttaatggtgtaaaagatttgctttgaatatatatgatagagatgctcaccgtagaaacataggtataagctaatatgcctacgaaaattttattattttggtttgctagataattatatatttttccattacctagttttattgcaactatcatcattagtattagtaagaaacgtagtgataattggcctatcaaagtaaatgacataacctgagtgatcatatcagacacaatatcaactaataaatctaatgtgcatactaatattattgaaccaaatagtatttctaatgtattattttttctcaaatataatacaaaaagcaaagtttcaagtatatttgtgaagattacgccaatattacctatagacaataacaaccctaaaaaaatattagcaatacacaaaaatagaatctgtctctttttagatcttactcttgatattttaaaaaaacaccatacatctgctaaactagaaaaaacattaagaaaaagaaataagactatcttttccatatattattccaaagttttttactcaagaaattaaaaccaacatgtgccgtgcttccaccaacaaccttagtcaattcttcttccttcaaaacagtctttttaacattttgcttcttcatgatatttcatcctttcatgattttatactcaacttgtttacacctttaatatatcatgtacttttaagtaaattaaaaaagataccaattcagtcatactttcgtaccgatccggtttcatatttcttcaaacgtaaacaactgacaattaattttcttagctaattcctgacagctatccgtaaagccagatttggaaaatagataataatgcttaagtggatacttgaagatttcactatttgtaatcaatttttctaacacactacgagagatcggttcattcttccatttacattcgccgaaatatccatcacgttcatcgtcagagaatcctacaatatctaactcaacttgttgatgtgttctcttatcggttccccaccaattgcccaagtggataaacggattaggaacaattttttcattcatatcctgagaccacatgaagtcttgactgtatttttcaaactcaggtcccatgaaatcagatagacccttttgtacttttacccaagcaagatcagttaagccacgctcaattagatcggtttgcttgccaacaaaggtataccagaagcggaacatcccgtcacagatacgataaacgatatttttgcttttactcttcttttgctcagtaaccggtaactttttctcaacaatacctaaatctatcaaattattcaggtacgtggttagcggaccagtttgtaagtgggcggattgcgcaattttactatgcttagaagcacctgaagctatcgcattgataatcgaattatagttagttggatcgcgtaattcctgttgtaacaagttattaggctcatcaaataagcgacctgatttactcaaaaagtttttcttaatattatccgcaactgacatgctgtctgacatataactcaaatattggggtacaccgccacaaaccgtattgatgataaaagcgtcctctttactgagttttggtaacatttcatgtgcttctgataatttaaatggttcaagctttaaggctaaagtgcgacgaccatatagtggactttggtagcctaagacttgtcgttccataaatgacatcgatgaaccacataaaatcaaaaataggttagtttctttgaattcatgatcaatgtaggattgcaacattgaactaattgtagggtaagccttagccaaataaggaaattcgtcaataactaaaattacacgttgtttttgagctaggtgtgtaatttctttaaagcattcctcaaaatttgcaaatttttcttttccaccctgatctgtatttttaaaaatactaattgcatcagaaaaacgttttagattatcttccgcattttcttcaagtgctacataataaattgactttttatcttttaaaaactcattgatcagtgaagtctttccaattcttcttcgaccatagatcactgtaaattgaaaatcattttcttgatacgcctgattcaattgctctaattcttgatgtctacctacaaacatagcgcactccttttcactacatcgtaatatactacattatattatactataacacgatatagtataacgtaatgtacgtgtattctatttttgtaataaaaatggccgttacttagagaaatagcgaagatcattaaattttaacatgctataataacaatagaacaagaataaaaagttttagcgtgcgcgttgaggtagctcctcaacttagtcattaacgtgtggctctgctttggcaaagcttttttgttatgttaataccctacaaaaaagaccgtgcatccctgcacggtcttttcatcttatcacatctattttctaacgtattcgccgttcttgtacttaaattcaatcttcttgttaggcaattgaaccgtaattctgcgatatacaggaccgaagccgtgcttttcaagcttaactttcacgctaccgtccttgtttaccttaaccttgtacaagttgtattcgcccttttggtacttaaagtcagttccgttatcttgatagtgaacgtacttaccctttttaccaaatagtctaaaggtcatactctcgtctggttcaccagagatgtggctaacttctttaccccatggcaagatagtgttcttcttgataaacagtggcaacttgccaattggtgcatcaaccaaaatcgtggtctttccagcatgttcaacaccattccagaaatcaatccattttccttttggcaaatatacggcacgcttggtttgaccttcttgaacaactggggctgccaaaatgtcctcgcctaccatatattcatcattcaagttatacacctgtggatcattttcataattaaggacaagtggacgcataattggcaaacctgtcttagtttcacgatagaattcatcgtaaagatatggaatgaaacggtaacgcagcttcaagtacttacggtaaattgacaaggttggttcgccaaatatccatggttcttgtgagcgagttcctagagccgcatggtttctgtacaatggactaaacaatgcgccttcgatccaacgagtcaacaattcaggtgttgtgtcagcaccaaagccaccgatatcagtaccggcaaagctgaatccactcatacctaagttacataattgtggaatcatcatttggacatgtgtccataaactttggttgtcaccagtccaaactgtggaaaacttttgcgttcctgcatatgctgcacgcgtaatgacaaatgggcgttttccactgaatttcttcaaaccttcataagttgccttagccatgttatgaccatagacattgtgcatcttcttatgagttgaagcttcttcttcattatggaagacgatattttgtggaatttcacccttgaaggatgcaggttcattcatatcgtcccagatacctgaaacaccaaggtcaactaagtacttgcagttcttagcccaccacttacgtacttctttgcggccaaagtctgggaagactgaatcgccaggccaaacttggtttacataaacagtgccatctggagcctttacgaagtagcccttttcgataccttccttgtagatcttatagtcatcatctttcttaacgccagggtcaataatcgtgattattctgaagcccaatttacgcatcttagctacgaatttctctggtgactcatagttatcttttctccaggtaaatactctgtagccgcgcatataatcgatatccaggtgtaaaacgtcacatggtaagtcatacttacgcaagttttcagcaatcttctcaacttgcttttgactgacactgtagccccaacgtgattgttgatagcccaaagtccacttttgtggcattggtacacgaccagttaaataagtgtagttagtaataacttccttgagtgagtcaccaccgatgatgtagtagtcaatattgccatcaaccgctgagtagtagtaatagtcattactttccttacctaagtcgatgtggttgcgataagtattgtcaaaaaagataccgtaaggatgaccattttttaatcctaataaaattggaatcgacttatacaaacgggtaaagctctctacttgcggatcaggattgtcagtattccaattatcataagcatagtggcgtttgttcaaatagccggttttatcacccaagccataaaattcttcgtcatctgctagtgacttgaccacttcataataatcggcgtcatgctttcccagtaatttatccacatcatggccttcagattcagccagcttcaaatgttcctcatccatctgtcggtcaattggggttcttttcccccgataatctacgaccaatggattgccttgttcatcaaagacgtcaattttttcatcatcataagcttttactatcaacttagccgtagctatttcaatatgatcgcctttatttttaactgtaaaatcagttttaatttctttatcgccttcgatagcataagaattgctagcattacctcgatcttgaaagaatcgcataatttccggtgttaacacggtcaaaatcattggtccattctcatagtttaaggtaattttttgtccatctttagtaaaatcagtaagttgattaatcataatttacctctaaaaaatcaaaagttatgtattcgctttcaattttaacacaataagctaatcaattgggtcataccagaaaaaacaccttcagaaatttttgtatttaaatacaaaaaaactgccttacggcagttttatttaatttattccatcggaaaaatcttatctggattcaaaacataatttggatcaaaaacatgcttgatctttctcaaaagttcagtgtaatcatgaccatagaaatcctcaaaccaatctttgcaggcataaccaataccatgctcgccagacatatttccatccaaagctttagctgtcttataaagttcggtaatcacataatgactcttttgctcaaactcttcgtcactcattgcatctgagcaaagataaatatgtaaattaccatcgccggcatgaccaaagttaggaattcgcataccaacctcttgttccaattcatcaactctatgcaaaacatcaggaatatgattaattggcacacaaatatcaacttcatccatctttggcgtagacttttgaatagccaaaagcaatgcttcccgacaagtccaaatcttctttgcttcctctgaattagcatctaaaattaccgcatcagctgctttaaacttcttcgttgctgcaagggcaagctttaattccgcatccaattcctctttagttaaagaatcaagccctagaataatgaagccatcgccatttgcaatcgggaatttttcatcgtaatacttttcccagagactaatgacttttctacccataaattcaacggttgttggcactacaccagaagccaaaattgctggtactgatttaattgctttatccaaattaggaaacggaataattgcattgatcgattgtttaggacgtggatataaacgcatggtaacttcagttactacacctaaagtcccttctgagccaatgatcaggtcttttaacgaataacctgatgaggacttaactgccttagcgccaaatttgtaaagtttaccatcagttaaaacaaccttcaattcgcggatatgttctcgagtaacgccatatttaattgctttcaacccaccggcgttagtatccacattaccaccaattgtagcccaatgcattgctggagctggcatataagtaaatggtttattggctaaatattcttcaatatctttcaaccgaatacctgcttgcacagtcatcgttagactttctggctcgtattccaaaaccttattcattttcaccatatccagtgaaatgccaccttcaacggttaaattgccacccattagaccagtcgaattaccacgcggaacgataggaatatgatgatcgcttgcatatttaacaacgttttcgacttcttcattagtttcaggttgaattaccaagtaaggcattgctctaaccgtcttaaattggtcatgatcccaatgaacagttggcttagtaatgaatcgctctggatctgagataaatttactcaaattatctatatctgttgcagttaattttttaaagtccatctttgacacttctttccaaattgaaacatcctatattaactaatgtatccgcttttgtaagcggtgtcaaaaacaagaactgaagatttttttatctaaaaaagcaaatttccatactacctcactttaaaatgcgatagtatcgactttcatttaaataactattacacaaaatatgaaaataaaaaaactgccttacgacagtttctagttaaataaatccgacatcttagttggaatattattgtttttcacaaaatactttttaaaagtaggtaaatctgcattttcttttttcacatacatatcatgtaaagcccaaaatgcagtgattaacaaattaacgcccaagacaattaacataccgattaaaatatatactaagtaaagcattgatctatcccccgctatatcgtcacttgacccagagtcgcatcttcaatgaagtatctgacgaaagcttgattgaagctcatgccctggccgttgtaaacatgccactcttcgcgtttggcacctacagttctaatgattgaaattactgtgcaaattaccaaatatgcgattagcacgttaaaaattattttcattaccagcatgtctacacttcctctctgtactactcaactaatacactaatatttattagtcaatttgtcaacatcttttagtatttacttttttctccccaggtataaaaagccatagatagctggtccgatcactaccgccccagctatagaaactataatcactgcaataaagcgaggcatagcaaaaaattccgagctaaatttcatacaggcccaggccccaaagaaaaaaatcgcccagccaattaaaattgaaattagcatatttaaacctgaaaatttaggtttagagtttttattgttcatcaagttttctctttcataaaaatattgtgccacaaattgaaggtcaataaacaaaagtgacagattcggtcgttttttagacttatttggtaaaaaataagggagattaagtaaaatatggcgcttaatctcccttttgaatcaataattatttgcccataagacctgaaaaagccattcctaaggcagcaccaccacatgcacctgctttagctgatacgggacgagcataactagtaattgcataatgaaacttcatcacatcatgtgacaatttaccctgccagcttaatggatcaagaccaactcgaattaagttgcagacataattagctgattcaccattttctaactcatgctttgcatcaagtaggatttttctttcttctggcttagtatcttcatttactagtaggtcagtaatattacttaatagccattgttttaaatcatctttattttcttgatacatttttatccctctttttcgactttttcattaatatcaggatgcatccctacaaccattttagaatctttcatgttcttcatcgattcatttattttaataaaaaactctgcaagtagcagagctttttacctcattgcagagttacttatacatatacttagcacatgcttttttagaatccataccattacgaatcttcaaagctaattcaatcgatacatccgcaataattgattgtgggtcaatcacattgtaaggatgatctggtgccttttcctgagctaacgacaattctgtacatcccagcaagattacgttgcagccataatcatcatgcattttttgcaagatctggtggtacaatttaccatcaaccattcccttttctttaatatcggaataaatgagcttattaaccatcggttgaatttccggaccacctaattctgcctcacggtgaaccgcatgaatttcatccacatacaaatgatcatagattgacccttcagtcgcaatcaagccaattttcttttcttgtgggtatttttcaataaattgatgcactgctattctcatcatgtgtaaaaatggaatatcagtcaatgcagccaaatcatcataaaaatagtgagcggtattgcatggcatcacatagaagtctggtcccaatttggcttggcccagaacatcgtcacgtaaatcatagaaaaagtttggtttagtatgatctttaatataagccgttctatcaggaatttgtgcatcattaaccaaaatataatttaaataatcttggtccttagctatttttacacggtgattaattaaacgaacgtagctttctgtggcaatagttcccatgccgccaataatactaaagaagtgtttcactattttcacttactttctaaagtgttcttcttgaccttccaactcattaattacctgctgtgcaaccacaatatcagatggatatggggtatttactccgcgaattttttggaaagcgtcagcccccttaccacagattagcacaacatcatctggcgtagccatggcaatcgcatcatgaatggccttcttacgatctaactcaatagtaacgtcgcacttagagtgatctattcctgaatcaatttcttcggcaatactctttggatcttcaaagcctggatcgtctgtagttaaaaatgctttatctgcgtatgcagtcaaactttcactaaaaccgggacgacgtgacacgcctttatcaccaggagctccaacaacaacaataatcttaggatcgttgaattcgttacgcataaatctcattaaagccatcattgaggccttattatgagcgtagtcaactacaaccatgccgtgcttctttgttctctcggtttgcatccggcctggaatagtaacatcgcgaatacccttcgcacattgatcatggttaagtccagccaagcctgctccaataattgcggcagtaccatttgactcgttgaaatcacccagcatctttaaagtataatcaccattaattggcaatttacgtgccttatcactagcacaaactaaattgaaccgagtttctttcatatctaattgttcagaagagaatctgaaatcaattggctgcttcaagtctggattttcaaaattatcgcgggcaaacaaataaatactatcggggttggtagtagttgttgcggcagcgtagacttcatcaaagtgtgcagtttcagcgttgataatacatttacgtgagttaacaagcaattgtaatttgcagtgcaaataatctgcaaaattagggtgttcgttaggaccaatatggtctggactaatattcaggaaaaagcctaaatcataagttaaaccgaagacacgatttttcttatatgcttgactagaaacttccattaccaagtgagtcatgccattatcaacagccgttctcatgtctcggaataagtccaaactctctggtgtggtcaagcttgacttaaagctatcttcaggcttaggaccgaccacatcattaactgaagaaatcagagctgtcttaccaccattcgcttgatcaagcatccccttcaaaaagtatgctgatgtagtctttccctttgtaccagtgaaagctacaacaaacaagtcatcttgtggaaaacggaagaaagcagctgacaaaagagccattgccttagaaacatcgcgcacaattaaagcgtgcattccttttccttctggatatggttgttcagctacataacaaatggccccattgtctttagccattgacaaataagttggtctaaagcctgctcccttgcagaagaacaatgtattagtttgaatatcgcgtgagtcataagacacatagtccattttagtagctactgtatcttgcactgcgcttgacttgagcaagtgatgctcttttaagatcaatatacaggtatttaaggaaatactcattaacttttctcctcgttgtatttaaaacatttcagtcaaaattataacacagctagtgtgttggtgacgctttcttcggatcaagtggcaaacgaataataaaactagtccacttttcgtttgattcacagcgaattgtaccatggtgtaaatcaaccacacctttggtgatagataatcccagaccagttccgcctgtcttagtatttcgcgaagtttctacccggtaaaaacgctcaaagattttatttaatgatttcttcggaattggtgccccattattttcaacgcgcaactctacttcacgtttgttgactaaattggctaccaatttaattttagttgcccctgtaccatacttgaaagcattagaaatcaaattattgtaaacgcggaccagcttttccgcatcagccttaatcgttagattctttggccgcgcttcaatctctatttcaatgccatttttttctgcttctaattcaaagccggccgctacctgctccaacattgaataaatatgcaaatcattcagatttaacttagtattggtcgactttaaagtagtatattcaaacagatcgttagccagtgctttcatttgttctgccttagtataggcaatattgacatactttttctgatcttctggcgaagtcactcctgcttttaacaaaccaagataaccaataattgatgttagcggcgttctgatatcgtgcgaaacattagtgatcaattcatccttagattgctcaattgcccgttcttcattaatcgaatttacagtactatcaaccaacgaattaatcgaatccactactcgttgcaattctggtcgtacccgaaaattaatccgatgatcaaaatgaccattagcaatatagtgaagttccaaaataatgtgacgtagctgcatttggtgatagcgtcgaatcaagcgccagtacaaaacaaccaagtcgcccactcccattaagacgatgaatacgttttgccaggaccagagatgatagccacctgcaaaagtgatcgtcttttttagaaagtagattccgttgaccaggctttcatcctgcaaaatagctaagtgaatcagaatgataattgataaatttaataaaaacagaaggacgaccgttacgaccccttctgcaaacaattcgctcttttcggcgccagttagcttgacgcgttcttttttcatcttatgcctcgaccttgtaacctacgccccaaacagtttggatgacatcctcaccatcagtggctttttgaattttatcacgaaggtgtgacacgtgtaccatgacagttttagctgaaacaattgattcttgttgccaaacacgttcaaagatttcatcagctgaaaaaacacggttagggtgactagcaagtaagtataagataccgaattctaaggcagttaattggatagtcttaccatcaatagtcttaacttcatgtgaatcacggttaattaccaatggtcctacttccaaaatatctggtttttcattcttaacttgcttttgacttcttctcaaaagtgaacgtacacgagccattacttcaagtggattgaatggcttagaaacatagtcatcagcaccagtgattaagccttgaatcttgtccatatcaccggttttagcagaaacaataataattggaatatcggagtcttttctaacttccttaattacatcgattcctgacatatttggcatcatcacatccaaaatcatcaaaacgatatctggcgtagtggtcaatttagtaattgcttccttaccactatatgccgcaacaggttcatatccttcatttttaaggtagatacttaatagttctacgatttctttgtcatcatcaacaactaaaattttcacgaggaatgttcccccttcttgtttattattctctgtttttctatctacagtttagcagatatcatatagaatattttacacattttagaaaaatatactgctttcattatcctttttaaacaaaagctaaaaaaatacacgtttctccatcatgaaaaacgtgtattcattctatttactttaccttatcatcatgcaatttagtttcgacataaacgcagacgataaataacagctgccttgtttaacgcttattgaatttccttcttgccagtgtagagttcatagtagtaacccttttgcttgattaattcatcatggttaccatgttcaataatatgaccatgatcaagtaccaagattaaatctgagttaacaatcgttgacagacggtgagcaataacaaaactagttctaccagtaagcaagttgtccatcccggcttgaaccattttttcagttcgagtatcaatacttgaggtagctttatcaagaatcattactggctcatcagcaatcattgcccgcgcaattgacaacagctgtatttgcccttgtgaaaggtcgccgccatcaccatcaatcacagtttcataaccgtgatcaaggtcatggataaattcatctgcgtgtgataacttggctgcttgataaacatcgtcatcactggcatctggattaccaaagcggatattgtccataattgtgccagtaaagagatgggtttcctgtaaaacaattgaaagtgattttctcaaatcatcttttttaatgtttttaattggaataccgtcataagtaatcgttcctgaatcaatatcgtagaaacggttaagcatgttagagatggttgtcttacctgcaccggtttcaccaactaaagctaccttcattcccggtttggcattaatggaaatgtcatgcaagatttgatgatctggtacgtagctaaagttaacatgatcaaaaataatatgaccacgaacttgaaccttcttggttgagccatctttttgtggtacattccagtaccacttactgccgacttcatcgtttttcttagaaagagtaactgtaccttggtcagcttctgacttttgatcttccaagttgaaaattctttctgcaccagctaaagccattacaatagagtttaattgttgcgaaatttgggcaattggcatactgaattgcttagataactgtaagaatgaaccaatggcaccaagtgaaagcggagcccaactattaattgcagcagcaccaacaacaaaggcgatcaaaacgtaaagcaagttacccatgttacccataattgggaataaaattgtagcgtaagtgttagccttacctgaggcttgacgcaactcatcattatatttgtcaaagccttccttagattgtggctcatggctgaagaccttgatgaccttcaaaccattaagcatttcttcattataaccattgatttggcccagcttcttttgttggacttggaagaagtgacttgatctaaccgttaagtagcgcacaattccaaatgataaagcaaaaataatgaaggagaacacagtcaattgccaactaagtgaaaacatagcaactactacaaataataaactcaaagctgagttagtaaattgtggaattgactgtgaaatcatctgcatcaaggtatcaatatcgttagtataacgcgacatgatatcaccaaattcattttggtcaaagtatgaaattggcaagctttccatgtgaacaaacatttcgttacgtacacgatattgcactttttgagctaaaacacccatcagcatgttaaaaaggtaattagacaaaaaaccaatcgcatagatcccaaacattaccgcaattgcagtagctagagggccatagttaggaactttttctttagttaaaggcacaatataattattgatcaaacgttcaatgaataacgagccaataacgttgctggcagctgctagcacaatagtgatcatggaaacgatgagcatccatggacttgtactattaaccagtttcaataggcgcaataagattttggttctgctaccctttgtttgatttttacttttttccattgcttgatccaaattgctcacctactttccttgttcttcctggaatttagcgattgaactataaagttcgttagtcttcatcaattcatcgtgggttccgatagcttgaatttgaccatgatccatgacgataatccgatcagcatccttaattgaaacaattctttgtgaaataatgattttagtagtttctggcatatctttagccaaagacgttctaatttgtcgctcagtactggtatcaacagctgaagtggagtcatctaagatcaagatcttcggattcttaagcaaggctctggcaatagtaattctttgcttttgcccaccagaaacgttgttaccaccttgttccaccattgtgtcataaccatctggcatttcacgaataaagccatcagcatgggcgattttagcagcggcaattacttgttcatcggttgcattttcgttaccccacttgaggttatccttaatcgttcctgtgaacagcacattcttttgtaaaaccatcgcaacgttatcacgcaaggtcttcaagtcatatgacttaacgttgtgtcctgcaacccgaacggcaccagaagtaacatcataaagacgcggaatcattgaaaccaaggttgacttcgatgaacctgtttcaccaataatcccgattgtttcacctggcctaatgtgcaaattgatatcttttaaagcatcagccttgtccgcaggttcgtacttaaagctaacgtgatcaaagataatttcaccattggtcaaacgtttcaatggcttcttaggatcttcaattgttggttcttccgtaatcactgaccactggcacctgagataaccaattgcgtagtaatcatagctaaaatgtttaaactaaacaaaactgagtttgaataagtaaacattgaaattaattgaccagtttgtaaactaccgccaaccacttcttttgcaccgaaccagcagattgacagcgttgaaatattcaaaacagctgcaactactaatgcgttcaaagacataatcttttgtgcagtcgcaaacaacttgtaaataaagcctgatgacttcttgaattctttaatctgcggttgttcttggacataggtcttaacttcacgaataccacgtacgttttcacgcacaacctggttcattcggtcataccctctaaaaatcttaggaaagtatggataagctgttttaataatcaaacccaaagcaattgcaaaaaccggtcctaaaactgcaaagattaatgataaacgcggactaataataattgacataataattaaaacgatgaacatcattggtgctctaacagcaattctgatgatcatttgatatgccatttgcacgttgttaacgtcagtagtcaaacgtgtaactaaactggcacttgaaaagtgatcaatattttcaaaagaatagtcctgcatatggtagaacatgtcttggcgcaagtttgcggcaaaaccagcagctgcatgagctgagacataactcgcactagcgcctaaaattagcgaaataacggttaacactaatagcaatagccccattttactaatataggacatatcccccttcataattccgttatcaatcaaaattccgaccaaatatggaatcagcatttcaatgataacttcaccaataacaaacattggtgagagcaaagacaattttttatattgcctaattgatttgctcaatgttttgatcatagagacccacccttctattcttttattcaatctcgcaaataaaaagataaatggatcatctccatttatcttttttatctatattaagtttaagtatgtgcttatttttacggaaattcaattaacatgcttgcaaaacaggtaaattatttatgttgttgtggccttggtgcaaatgcggaaccaacaatattgtagtgctttctgaataaataacgtacaccataggcagccgccgcgataacgatgtcagctactgctggtaaaactgggttgattacgcgcaatgctgggatttgcaaaatccacatccagacaaacaaaacaactgctatagccaacattcttaagatcagcttaaccaatgaaggacgtttaccttgctgaggcattagccaatcattgtatttaaccatgaagatccccattaaaatacctacactggcaattgtcagaatccccatttgtgaattatacggttggttcttagtttggaataatgcaaggataccacataaaccaacaaaaattgctaaataaagcaatgcgccatcaaccatcaactgccaagttggtgtagccactggctttttcttaggatgaagcatttgttcagccttaattgctggtgaagccaggtaaagcccattggctggttgcccatgacgttgggcaataataatttcactgagcaagccattagtcatcgcaactgcatcagcacgtgacattgaaccttgtttttgcagttctttttctagacgaaaaacatagtcactgttcttgttactcaacttttcacgcaaagcttttggatcttcctgcttaattttttcatcctgagtatcaagctcagcttgcttctttaatttagcttgtttttcagtgttaatttttgtttgatcttgttctctctttgtctcttcagccattcttactcctagacgttaaatctaaattcaataatgtcaccgtcttgaacctcgtaatctttaccttcaagacgcagcttaccagcttctttaaccttttgcatagtttcaagcttgtctaaatcatcaaatgaaacaacttcagctcgaataaaaccacgctcaaagtctgagtgaataacaccagcaacttgtggagctttcatccctttgtggaaagtccaggcacgggtttcaggaccaccggcagtaaagaaagttctaaggcctaagatatgatatgcagcacgaatcaaacgatccaagcctgattcttctacgccttccatctcaaggaattctttcttttcatcatcagccataccagcgatttcttcttcagttgcagcagaaatacctaagcattctgcaccttcgctttcggcatgcttcttaacgatttggtaatacttgtcgctttctggatcagccattgaatcttcagcgatgttagcaacgtagataactggcttggaagttaacaagaacaagcccttaacaatcttttgttcatcttcattaaagtcaattgaacgggcagcattaccttcttcaagtactggctgcaatttattcaaaacagccatttcagccttggcttccttatcgccttgttgagcaaccttctttaccttattgattctgcggttaacagcatcgaggtccgcaatagcaagttccaagttaatagtattaatatcttcttctggatcaaccttaccagtaactgaggtaatattgtcatcatcaaaggcacgaacaacgtgaacgatggcatcagtttgacggatgttttcaaggaacttgttaccaagaccttcaccttttgaagcacccttaaccaatccagcaatatctgtaaattcaaaagttgtgtgcacaatcttcttagcaggaatcaattcttgaattcttgccaaacgcttgtcaggaacttcaaccattccgacatttggttcaatggtggcaaatggatagttagccatttcggcaccagccttagtaatcgcattaaacaaagttgacttaccaacgtttggtaaaccaacaataccagcagttaatgacatttgttgtcctctttttctaaaatcaattttttatttttacttacttgtctattttatccaaaatttggccgagcgatacgatcttttggcacatattgctctttttttgcattaaccggatcattcgccttagttaatagcttttttagcttccggttaaactcgctgcgcggcatcatgactatgtgcccacaacccatacattttaatttgatatcagcacccatgcgcaggattttccaatcattagtctgacaagcatgaggctttttcatttgaactgtatcagccaaattataaacaatttctttagccatctaaatcaacacctaacaaatcaagaatgcggttcaattcttcagtcgaagcaaaatcaatcgataaatgacccttacctttttgtgtttccgaaatattaacactagagccaaacttgttagctaattggctttcactagcgcggataaaagcagactttttagcagttttcttgctgcgtggcttcttagcattcagttcattgacaaccgcttcaactttacgaaccggcatcccttccttgactactcgcttagccagcgcatcaatcttttccttatctttcaaacttaaaagcgttctagcttgtcccatcgacagttcaccatgttggagtaaacgcttagtcttgctaggtaaagtgagcaaacgcaaataattagcaatatatggtcgcgacttgcccatccgcttcgaaacttcttcttgcgttaagccaagattcttctgcagcatttcataagcttgcgcctcttcaagtggagttaaatcttcacgctgcaagttttctagaactgccacttccatcatttggctttcgttaaacttgcgaataattgctggaatagtcttcttcttagccaatttagaagcacggaaacgacgctcaccagcaatgatctcatatccattaactgattcgcgcacgataattggctggaaaacaccattttccttaatagaatccgacagttcttttaagctcttatcatcaaatctttttctaggctgataaggattcggccgaatatcgcccaaatcgagttcttggacttcttctgcctcttgaacttgaggctcatcctcaaataaggcttcaagaccacgacctaggccgcccttttttcttggctctttacttcttgagtctcttgtcatgagcttttaacacctcttttgctaaatcatcatataccttggcaccacgagattttggtgcatattctgtaattggctgaccataacttggggcctcagctaatttagtaattcgaggaatgatggtcttataaactttcttgctaaagtaggactgcacttctttaaccacttcagcacccaagttagttctggcatcaagcattgttaacaaaacgccttctacgccaagatctttattaaaatgcttttggactaaacgaattgtgttcaaaagttggctaagtccttccatagcataatattcactctgaactggaatcaaaattgaatcagatgcagtaaaagcattaattgaaagttgccctaatgatggcggacagtcaataaagacaaaatcatattgatcgctaattgcatctaaagctgactttaagcgtgtctcccgagccatcattgaaattagttccgtttcagcaccagacaagttgattgtggctggaaccatatctagctttggcgttgaagtatggtgaatagtatcttgaataggaatttcgtcaatcaaaacattgtaaatgtcctggtcaatctctgatttttcaattcctaaaccagaggtggcgttaccttgcggatcaatatccacaattaaaacgcgataaccacggtcggcaattgaggctgctaaattgatggtcgtagtggttttacctacgccacctttttggtttgcaaccgaaattacatttaccatattgttcatccttccctattacttccttttcaattcaattgtgatcttataatcatccggatctttattttctgttactttgactttaattcctgagtcttcggctaacttaaccgccttcttaatggtgttaatttgtacctttaagtctttaggaactcggctaacgacccgcttagcttcttttttagccttaggcttagggttaaagtaagcatccacatctttcacaatctcttcagtttgtttaacgtttaagccttttgcttcaatttctgtcaaaacgcgatcttgatctgcattacttaagccgatcattgcacgaccatgacgagcggtaattttgccagcaatcaaagcttgctgcacattatcatccagcttcaataagcgcaatttgttagccacataagattgagacttacccatatttttagccaaagcagtttgagtcaaatcattcaattccattaaattggtataagcttttgcctcatcaattggatttaagtcttcacgctgtaagttttcaatcaaagctaatgaagcagcttgatcatcactcatattcttgacgatcgcaggaatagtctgccagcccaagcttttagctgcacgataacgtctttcacctgcaataatctcatattgctcgtcatcgccatcttcacgaactacgataggttggagcaagccatccttatcaagtgtttcagctaattctttaattgaatcatcagaaaattcacgccgtggttgatagcggttaggaacaatcttgctcaattcaagatcttgaacctgtttattcttaggaatttcatcatcatgatgcataaaagaaaataatgacataatatacccctttctgtttaatgaatcggtttgcgccgcggggtgcctgcttgacgtggatactttttaggtgttgctttgactttttgaactaagattagagttcgttcttcttcgctctcaggtagagtcaattcttcttccttaatcagcttaccgcccagcaattcaagagctttttgaccatcatccaattcatcttcggcttttggtcccttgagggcaataaagtaaccatcttttttcaccaaaggcaagcaatattcactcaaaacactcatccgcgcaaccgcacgagcagtaacgagatcgaacttttctcgataaagcttattttgaccaacgtcttcagcgcggccatgaactaattcgacgtccttcaagtctaacttagtaattaagttctttaaaaaagtcaatcgttttgccaaagaatcaacaatagtaatcttcaattctggctgcaaaatcttgagcggaattgatggaaaaccagcaccagcaccaacatcacaaagagtagcaccatctttaaaaacatcgccaaaagtaaacagcggcgtaatactgtcataaaagtgcttaaggtaaacctcatcttcttcggtaattcgtgtcaaattgacatgctcattaacttcgatcaaataattaaaatatattttaaattgttcaatttgttggtcagttaatttaaaattgtgttttgatagttctaaaataaatttttcaggattcatttttcacccgtgaaaccgtgtttcacacctctaaatttaacgcaaaatgcattgattagtaaagatatttcatcttatcaattatgaagtatttttactcaatcgtcaaagttttgccgcccgcaaaatagggtataataaggcgcaaaggagttaaaaatatgattgttactttaattgttttagcttacttagcatataaaacatatttaggctataaaacaggctttacacgctatatcatcggtttaatctgttccgccattgtctttatggttgccattttcatgcaaaatccatttggtaattggctatacacacaatacactggagaaatgattaagactaactccactaacaacgtggaattaatgattgcacgctttgtcgctttctttattgttttcttcgtgggcaaaatgatcatgaagattgtcaaaagctggattcctaacaaaaatccacatgcgactaacttaggcagtattctcgacaatgtcttgggtgctctagcctccctaattgctagttattttgttgtttatgtagttttgtccatgttcaatgcactacaaaatccatggtttatgcagcaaacaattgattctagctttttgaggtttatcatttacaacacaccggggctttcaaacggtgtcttcaataatatctttaatattggcaaaactgtgggataaaatatatcaaaaaagatctgcttgtatcatactgagcagatctttcttgatatgttttaactaaattaatactacatttatgaaccaacattcgatatacttattagcgcaggaagttttatgagcggcggctggttctccccccggaggtgaggcctatgggctacattgatgaaagggttccagccatgtcgatttacgagagtatctccttgatgcttttgttcggtacatttttgttggctttgctgacatatattgaccaccaccaaaaataaaaaacgccgctcaaacatactttggccagttattgagtagcgtttaacgtaaaatttaacatttgaagccgccgctcttaaagcgggctgcttggagtccctaggactcctttttctttagtcattatagcatatttcactaatcaccgaaattatcatattcaatatgttcatcattataaacaaagattgcaccaattcgatcagggttatcatgccaaccctttagtggcttgccagcaaagaataatcgtttgcattcaatttctgcttcaaccgatgttttggtaaaagtagtcacaccagctaaatcagtctttacaggatacccggttctaggatcaatcaaatgatgatactttttaccgttaactactaagtagcgctcatatgtcccactagtaacggctgagcattcaggcaccataactgacgtaatattgtcgcctcgcggctgtttaggatcttgcacaccaattgaccactggccactaattcttttaggcgaatcaccaactaacaagatattaccgcccagattaataattcctgcttcaacgccatatgcacgccacaagtcacgaattcggtcggcaatccaacccttagcaattccacctaggtccagctccatgcccttcattttaagaaaaacagattggtcactgtcatttaaaaccaccttaaatgggtcagttaacagcattctatctttaatttcttcatctttaggaacatgtgcgcctttaaaaccgatatgccaaagcttaacaactggtccaatcagagcattaaagccaaaattctcacggctcttttctactgccaatttaaccaaaccatacacagcactagagacctgtaccggatgttctccagcagcatgattgatatccattacttcagattcatctcgattaacggtaaaaatatcttcgtaatgatcaattaaatcaaatgatttttgcaatagatcacgattttgagtaccaaaaatctgcaatgtaattgaagttcctaaagcatgatgatcaccaaccacctgctctaatgctaaatctttaatcataattatttctcttccaaatataaatcacgcaacgcctcacgtagttctgtcgttacgccaattttttcttgtaaaaagttatcgaaactaccaaaattctgctcaatagcgattaatgaagtatccaaaaaagcatcagaaactgaacctaaaattcgcatattagcgcgaaaacaaagattctcgccctcttcttgcatttttttatctcttttggcccgatagttattaagcatataatttgagtacaaatagtcctgtctaattgtttccatatctacgccaagcagatataacaagactacagttaccaatccagttctgtcttttccttctgaacaatgataaagtacagcacctttttcagtattggccaacagctctaaaattttatgcaagctatgttgagcgtgttctttcaatacatgtgacttgtaacgctcacacatcattctaaagccagcatactgatcttgacgataagttgcgaatacttgggttaagtctttcttaccgcctttggtgttgtcatcaacagaaattggaatacagaaatgctctacgccagggattttgctgtctggacaatggtcacattcagttggtgaacgcaaatcaataatcttagtcaagccataattgagcaaaaactcttgatcatgtctcgttatgttgctaatcttgcccgttcttaataaccgatgcatcttgaccttacgtccctgatagccaacatatccgcctaaatcacgcggattacaaactttttctaatggcaaaatatttggtttcattaatttcatctctttattaagtattttgataaaaaagccggatagtgtccctatccggtaattttactatcacgtggtaagtcacgcaaaattatttgttagcttgttcaacaaatttaataaagttagccatcatagcatctagttgcttaatataatcttcattggtcaaatcgccagtttctttatcaaaattgcttgcagcaccgccaattaagatttcattgcctggcaaaacattggcactcatgtctggtgaaagcaagatttcacgagcatcttcttgcgcacgactagatccttgaataccgtatgaagtaccaacaactgcagccggcttcatcttcatcacattaggaccagcatgtgaacctaaccattcaagcgcactctttaaggcagctggaattgagtgatcatattctggtgtagccaaaattacaccatccgcattcttaacatcctcgatccacttcttagtaacatcatctggctcatcagttctacagaaaggcttaagttgatcgatttctttaacttcaatatcagcttgctcaccataacgcttagcaataaattttgctaaaaaacgattgaaagaaaatggagcgtttgtaccaacaattgctaaaattttcatttaaataagccccctacttagtaagttgtgcataccaatcatcaacttcatcaaagaagtgattcaaaaacttaagtgtacctgcatcggtcaagtcgcctttatcatcaaattgttttggtgccaaacccatcataaattcgtcaccagcaaagacatgagcactaaaaccaggtgcgcccaaaatgctcttcaagcgagtttgcgaacgagacgcaccttgaggcattggtgaagttgacacaataactactggcttatcatggaatgggtgaacagaactagaaagccattcaagtgcactctttaaggcacttgaaaccgagtgttgctgttctggtgaagcgatcaaaaccatatctgcatcagcaatttttttacctaaagctaatacgctagcaggagcatcaacgccttctttatacataggcaagcccttaacagtcgcaaagtcaaaatcatacttatcgcctaagtccttaataatgactttaagtaatttttcgttaaatgagttatcggcattggagcccgataaagctaataccttcataaaaaccacctttcaaaaatcctcttagttatcattatagactaatgtagcttaatttatgtcattttaattttaataacaacaagaaaaaacgccttcgataatgaaggcgccctctactgaatgaaaagcacaaatgattggtgaaatttctatgccaagttatccttaagcgaagcttcttcgtcggcagcaaacattgggttttcttgagtttcgctgagacgattgttaagcatagcatcgtggatttgagcattcaacacattgacgatttgagtttggctgaagcttgcaatctcattaacaatcaatgcagccatacctgtagtagaaatccagttagcaattacgatgtcatgaatcttttgatcatcgtaatcaacatcaggatattgttccttgaacttttcagttccaagttccatcaaagtgtcagcaatgatcttgctaccaaacttgccatcaacgaacattgctctaaacaagttaacatgagcttgagcaaaatcaatgtatgacaaatccaagtcaatcaaaggttcaccaacgtacttttgttgtaaagtatgtgttctcaagtcattagagattcttctcaaaacttgattgcgaagatcatccatgttgttaaattctagatacaaaggttgggttgagaagtgtcctgctttagcaatgccacgagcagtcaaaccttcaataccatccttgattgccatcttgtaggctgtatctaaaatcttgtctttactaatttctttttttcttgccattttaatgcacctcaatcattgtataaaacatgtgcttttcaatacacttgttttcttttcttcatcactataatatatccaaaaaaataacaattgcaagtcttatacactaacttattaaaaaatattataatcgcttaaatagcgatgagccgttgtctcctgtaaattgatcataatgtgaagaagccatttcaataactgcttgcttgtccaatccttgtgcagcacaaaacgaaaagaatgcagcagataaaatatagccgcgttcacgatcatctgtcaggttatctgagaacttcatattaatcgaatgatttgcataatccgttgtcaattaaatcgatttattttctggtttactactcattctattgcaacctcttttttgttctaaaacaaataaaattaaaaatttaaaaatttctattataattatattcccggatttaaaattgaagtgcaacactaattgttaaacaaaaaggccatgaagacctaaacttgaagtgaccaaaaatcaagaaaggaagatcttcatgaccaactcaaattctagcatttccaagcattatcatcaattgaacagcgaacaacgtggacaaattcaagctctgcttgattctggcataacctcctgcactgctatcgctcaagaagtaggctgtcataaatcaactatcagccgtgaaattagacgaggcagtgtcctgcaaagagacagcagctatgtcttgtatgagcactattacgctgatactgcacaaatttatcatgaaaagcgccgcagaaactgctataagtgtaatccactgcaacactatgccgtttttttcagaatgctaagcagacgctttaaagccaaatttgatgccactagcattgatgaattcgttggtgaatttcacaggattatgccaaattatccatgtcctagcacgcccactgtctatcgttatattgatcaaggattgctggatataagcaatatcgacctgccaatgaagcttaaaagacgcagaaacaaacgccatcatagtcatggtggccatgctccgcataaaaagaatcttggcaattcgattgaacagcggcctaaagaagttgaaaacagaaaagttcccctgcactgggaaggcgatttggttaaaggcgtcagacgtaaaaatcaacctgccttaatgacactgactgaaagaaccactcgttttgaggttgttatcaaaattcctgactatcgggccagtacttgtcaaagactgcttcaaaaggagattgacagacatcctaattggtttaaatcaattacgtttgacaatggttctgagtttgcggatatgaccaaaatcaaaggatgtcagatctactttgctcatccatattctccttgggaaagaggcacaaatgagaactgcaatggacttctgcgtcaattcttccctaagggcaaaagcatgaaagataagtcagctgcttatgttcaacaggcaactgatgccattaaccgcaaacatcgtcgaatcctccaatatcacacagcagaactcttcaagcaatacgttccttcatagcctaactgttgcacttaatttgacaattcaggttataattatattacaaaatcaaaagaattagaaagcgtgtttttatcaatgaaagtttcagcttggcgctcatcatgcacctcaattttaatcgggaaaaaggcctctctttctggcagtatcatcatcggtcgtaatgaagatgctaagactgcttggcctaagcatttagcctttaatccacatcgagataatgtacagaaaaaccattttaaatccaaagacaataagtttgaaatggatttaccaacagctagctactcttattcttcaaccccagaatggacagataagtacggagtgttcgaagaagacggaattaatgaatatcatgtagcaatgagcgccaccgaaagtgcctacgcaaatgaccgcgttttagctgttgacccctttgatactgacaaaggaatcttagaagaggcaatggtcaccgtagttttaccttatgttaaatccgcacgtgaaggcgttcagcgcttaggagaaattgtagaaaaatatggtgcagcagaagctgacggaattctctttggcgatcgtgatgaagcctggtacatggaaatcggttctggccatcattgggttgcacaacgaatcccagatgattcctacgctgttgtcgccaatcaactagctattcaagaaattgattttgccagtgacgacttcatgtattctcaagacctgcaaaaatttgtctacgacaataaactctggcctaaaaatcagccattcatttggcgtgatatttttggcactcatgacgatagtgacttacactacaacacaccacgagtatggagcggtcaacgtctgcttactccatctgtagcacaagaacccgaaagctttaacctgccatttattcgcaagcctgatgcaccaatttctgcgcaagacgctcaacgcgttttaagcgatcactacaacaacaccgcctatgatttaaccaatcagaaaaacagaaataatgccactttcagacctatctctgtggctactactcaggaatcacacttgcttgagttaaacggtgaaaacatgattcactggctagctatgggtgtggctgcgcaaagtgtttatgtgccattctatcctcaaggcactaaggtaccaaatacctggaaaaatggaaaagaaacctactcaccaaattcagcttactgggtctttaaactggctagcgtcctggttgatcgtaattggggtaagtacggcaccgctttaagcaatacgcaaagtactactaacgaaaaattgcttcaaattagacagcaatatgatcaaaaattagcacaagaaaaggatcaagaacaacaaattaaattagtggatgaagccaatgccaaattagctaaaactgctactgatgcttataaagaattgatcgctaaactaatcaccgaacaaactggtgactcaccgttgcgtttccaaatggatcctaacttataaacaaaaatgcctcaatgaggcattttttcttactattttttcttagtcattaagccgtccatcatttcataaatatggtcggcgtatttttctagccgcggatcatgcgttactagaataacggccttgtcacgctttttcgctaaatctttaaacaattgtcctacttcttccacattttgcgtatctagcgaagcagtcggctcatcggctaacaaaatatctgggttagcatataaggccgtcgcgattgctactcgctgctgttgcccaccagataattcatttggatacttattaaccagcttttcaatccctagctgcttgagtaagccttgcaatttatcttgcgacaaattattttgcttttttactttatcaatcaaagtaaattgctctttaactgtcaaaaatggaactaaattataagcttgtaaaacaaagccaattttattcaagcgtagttctccactttgcttagcagaaaaattactaatgtctcgaccattaatcaaaatttcacctgaagttggtttttgcaaggacccggcgatcgtcaaaaatgtacttttaccggcgcctgaaggccccataattaaaaccacttcacccttattagcctgaaaattgatatctttcaaagctgcaactttagcttcgcctttaccataaactttattaacatcttttaattcaattactgccattttactcaccaattgcctttgctggatcaaccttcaaaattgatctaatcggaatcaaactaccaataatacccatgactagcatccctaacgtaccactaatcataattgctggcgtaaaagtcattggcacagctgctggtaaagttaaatcagttaaccacatcaagataatcgcaattacaacaccaatagctactaaaattatggattgactgatcgttgcaccaactaaagttttacttggaattccttgagcccgcataacggcaaaattatgcattttttgcatagttaaaatatataggaaaacagcaatcacgatcaaagaaataacaaataagaatccaatcatcaattcaaaagttaagttttgagccgtatatcctggaagcttattaataaaggcttgaattgggtatgtcttggcatccttataattgaatttataattgctattctttgaaacaactgcagaagcggctacattaggagcgaccatccgcagttttttccaagttttcattgagccataaacaattggcgcaatattaatcttggcgttatttacaaaaccaacaattttatattttttcttagagccattcagagaaatttgatctccaagcttgtagcctttgtctttgaaactactgtctactgtaatctgattaccattctttgcttttttcccagcaattatatcttgatcttgataaataaactggtcttttttgatgcctaagaattgagctgaaattgagttttttccctttttcttaactacaattcctaattgaccaataattgcttcattcttgccaatttttgcgttttttaaatcgtcttttgtcagaattgactgactcatgctgatattggcatttttatttaaaacaatcttttgcgcattccaattttcaattgcttgtgtattctgacttgctaacccaacagccaaagatgacaacataaaaattaagtagctgatcaaaaagatcatcaaaataatcaagccatagcgcaatttttcatgcttaatttctttcagtgctagaaacataactacatcccctttgctagtatgtccaggctcttcttatagcgcgccaagttcttttcctgattttcgggatctgataagcataagttgataacttcatgactaagtaccatggcactccacaattgtggccccatattcaacaattgtcttgaataaattttgaaattatgtggtatcaagtactcattttgcgacatatgcaatttcatcattggttcatatttactgtattgaactttatcaataaacttaactactcttgcataaaaatgattaggatcaaatttttcattaggactcatcctagcatgaatgtcttcaatagcgatgtgatacatataaacatatgcatcaattaaatcatcaaaatatttataaaatgctcctcgagcaatgttggcattcttaacaatatgtgtcaccttagcatctgctaacggataagtgctgaattcttctaacaacaccgcttcaatacgtctacgtttagcagacggtaaatttttaaaagtttgcttaaccattttgttttccccttttccaacacaaatgacgacttgtcatcaattacttatatcatagctgattgtgacgagttgtcaatacatatacaaaaaaagaaggcctctgccttccttctctaaactaaaactcgattatagtagtacaacctagcaacaccatcacggacgctaaatttacttaatgcacaattatttggcgtatctatcttgtccatgtcgccattactcaaataatgagctgccatcattcgaatcaaacgaccatgtgccactactaataccttaccttctggatatttttgatatatttcgtctaaaaagttagcgcaacgtgcttcaaactcttcgtagccctcaccatttttggcatatttaacatagttgcgagtaacttttccccatggatcaacaacatccggatattccttagcaatatcatccatcttcttgccgtcccaatcaccaaaatcaaattccagcaaacgtttgtctaaatttaatttctttttacctttagtaaaaattctcgcagtctctactgctctcttcattggactggaataaacaacatcaaatttattttcatcaaacttagcggcggattttttagcatattcacgaccaaattcattcaagtctgcgtcaacttgtgcgccctgaattcgattatctttattcacgtctgtttgtccatgacgaataaaaactatttccattttttacatcaccttttcttaaaatcatacccttatttaactaatctttccatttctttactgtttttttagcgttttgaaatttaaaaagcttaaaatataaatagataattagaaaggggaaacattatgtcccgcgttacaattgaaagagatggtctcaccttagtaggagaccgcgaagaaccattcggcgaaatctatgacatggctatcctcatgcatggttttaccgctaaccgcaacactgaattattaagacaaattgccgatgatctacgcgacgaaaatgtcgctagcgtccgttttgactttaatggtcatggcaaagtgacggcaagtttgaagatatgactgtgccaaacgaaatcgctgacggcaaggcaatcttagaatacgttcgcaccgatccacatgtacgtaatattttcttagttggtcattcccaaggcggtgtaattgcatcaatgcttgccggtctttatcctgatgtgattaaaaaagttgtccttttagcaccagctgctcaattaaaagacgatgcacttaaaggtagcacacaaggcgcagtctatgatcctaaccatattcctgatactgttccactagtcggcaataaattaggaatgaaactaggcggattttatctccgaaccgctcaagttttaccgatttacgaggtctctgcccgctttagtggcccagtatcagtcatttatggtactaatgaccaagtagttaaccctaaatatgctaaaaaataccatgatatttatgaaaatagcgaacttcatgccattacggatgcagatcacagattcactggtcaatacaaaaagtcagcatcagatttaactgctcaatttttaaaaccattattttagcgccgagtaaagtcgaactcagtacgaaagacgtaatgatccttagtacttacgtcaggttcaaattgaaattcaaaatcattaaagtcctgcaaatctgtgggattttttatttgcttctcggcaatgtagcgcaccatttcaccacgagccatcttagcgtgaaccccaacggtcttccacttaccattttttagttcctgaaagtcaaccgtaattaattgtcgtccttgactcaaataaggtttaaccaaacgtgtatattgcttggaagccaaatcgataactatattatcttcttgaaataaattttcagcgatatcactgccccagaaataatacaagctataatcacgaaaaccaaccattttagtatttaattctaggcgatatgggcaaacaccatcaaaaggccggagcataccataaaatcctgatagaatccgcaaattcttttgaatatagtcaagtgcaggttgtgtaaataaatccggagccatatattggtattgaattcctgaaaaagccaaaattgcaggggttaatcgttcatccaaattcatattttctagttgcaatatgctttgcttagtcacattttcactagcatgccaaaggtcttttaactgttcatttgaccttgacttaagaaatctttctagaattcgtgtcttatccaagaactgcggttttgactgaattggaaatgaatcacgatcaattttcataatttttgcaggtgcaataataattttcatttttagattttgttcctttacggtaaacttaaattgtgattaataaggaggaaaaataatgaatcctgattttgcaattgtcttaaattatcaacttaatgataaggctgatgccgactttttagtaaaaacagcccgtaatatcggtgctcgtgcagtgatgactgacaggcaaactgaagatttcaaaacagcttgcgctaagtatactatttttttagctaatccagaaaatagtactgacttaactaaggataacgtcattgataccatggtcaataaccgtaaagctggtaagactacaattattaatgtgcccgttgaagcaggcaagttttctgccgcaactcaagcaatgctggatacgatcaatgattggatgcaccaattcggtcacgccttcaacgaaggaaaaactagtgctttaaccagtagcgatggctttattttagaaaatcgccacgcaaattaccaaaaatatgtcttcttacctagtcctcttcctgacaaaatcgtggtagaaggcctagtcgaagaacctaaccgggtagaatggattgaacatcgatctgatcttgattttaactataaggatcaaaaattaactattaacttagtcaaaccagatgatgagtttgcttggcaagtgttgcgaattcaagcccaccgacctgaagatgacattttagaaacgaaattttagtaaaaaggcgttctttgtagcagaacgcctttttacaaccttatgtaattgctatttctattttccaaaaaatttattcttgcttaagctttaactactgaaccattatcaaaaaattctctaaaacgacgtgcttctttatccagagtaatttcatcattaacttgcgataacttatagccaacaaaataaggtggcgcttcaaaacgtgtaatatatttagcacaaataccgtcatcattacgcggataaaagaatagattataagaatcgcagcggccattatacatgatatttaacaaatacttggcaccactttgaatccagtcagcccacaagtcaatgctatttttatctaacaagttaatattgagctcagtgtagccttgaacggggtgttcagcaatgttaacttctaccccacttttttcaaaaagggtctcaccttcaaaattattcgggtgaatatatttatagccatcttcatgttcaaagccaactatctgcatatgcgggtgaatcaaggaaccacctgaatgtggaccatagttcttgtaccaaacaattgactcatattggtcactagcctgcactttttcaaaacaagctagcgcaaaatgcatcaacttgcgattatgttcctgcgtataagtactaatatcgccgttatgatcactagattcaattagtacagtctgccaggtatcgcgcaaggtcgggaacttattcttaagccaaatcatgtcatcttccttggcgtaaatatcagttaaattttcaacatcacaaaatgggcaaacgtttttcttcttatccttacgataagattgcggtttgcctttagcaatgctcatttgaaaaacaagtggatcattagtcatatttattccttttttttatcctgaattgtcaaattaagtgcaacagttaggttatgaagagatatattgcttgaagagttcctctgctgtgtgatattggaggattcggcgatatttgtggttaatggcatcagttgcctgttgaacataagcttttgacttgtctttcatgctcttgcccttagggaagaattgacgcaaaagaccattgcagttctcattggtgcccctttcccatggagaatatgggtgagcaaagtaaatctggcagcccttgatcttggtcatatccgcaaactcagagccattgtcaaacgtgattgatttaaaccaggcaggatgtctgtcaatctccttttgaagcagcctttggcatgtgcttgcccgatagtcaggaatcttgataactacttcaaagcgtgtggttctttcagtcaaagtcattaaagcaggctgattcttgcgtctgacgcctttaaccagatctccttcccagtgcagcggagcttttctgtcttcaacctccttaggacgctgttcaatggaattgccaagatgcttcttgtgcaaagcgtgaccgccatggctgtgatgacgcttgttcctgcgtcttttgagcttcataggcagatcaatattgcttatgtccagcaagccctgatcaatatagcgatagacggttggtgtgctgggacaagggtagcctggcatagtccttttgaattcaccaacgaactcatcgatgctggtggcatcaaatttagctttaaagcgtctggagagcattctcaaaaagacagcataatgcttcaatggattgcgctgatagcagtttttgcgacgcttctcataataaatctgtgcagtatcagcgtaatagtgctcatacaataaatagctgctgtctctttgcaggacgcttccgcgtttgatttcgcgactgattgtcgacttatggcagccaacttcttgagcgataacagtacgggaagttatgccggaatccagcattgcttgaatttgtccacgttgtacgctggttaattgatgatagtgcttagaaatgctagaatttgaattggtcataaagatcttcctttcttgatttttcgtcacttcaagtttaggtcttcatggcctttttgtttaacacttagtgttgcacttcaattttaaatccgggttccttttttttatttaaaatagtttaaaatctaatgggtaaagttttactataatgtaaaatattttgtagctttactagcataaaaatacttgttatactttgttaaagcaaacgtttattcgaaatttatcaagagacgggttttaataatgcaatctagaacagaaatgagaaagcgaaacaatcgcaacaatctctatcttattattattggcataattgtcgtaattgcaattatttgtggctttgtcattcataatcaaagggtagctgctgaacgtagccagcgtgaatatgcttctacccacttcaaccctaatgtaacaatttatggtgtgcaagtaggcaagcttactgttaacaaggcgactgctaagatcaataaacaagctgataatgtcgtctttttaagaaataaaaagattattgctgaaaaagacgacaaggttcaaactatcagccaagctgaagttaaaaatattttcactaagcagcatactgatttgccaagcaaacaaaaatacgttttcaaatccgccaaaatagatgaagcaaaaaagagtttgcaaaaaatacaaaatgctgtagtcacctataagatcaatggccaggaattcaagctaaaagctgatgacctaattcacgaagttacttacaaaggtggtaaatataaattcaccgatgtaaaaaaactgcatgctaaaatggaagcgatcgatcaagaagtcaaaactctaaagaagagttataaatttactgttcctactggtaacaaagtcaatggcaaaacgattacggtaaaaaacgaaagctatggttggggaatttatgtcaagaaggctgtggctgcagtagaaaatgcttttattaatggtcaagatgttgttgatggtagtaagtatatttatggcgagggttatagtacctatgctcatggttatggcaagagcaatcatggtattggtaaaaactacgtcgttgtctccatcaaaaatcaggaactatgggttgtccgtaaagggaaagttgccgttcacttaactgacgttgtcacaggtactgaaaataagagtaacgctactcctaaaggtgtttggtatatcatgtacaaagaatcacctagcgtattgcgtggttataacgacgatggctctaagtatgcctccaaagtacaatattggatgccatttactttgagcggctgtggcttacatgacgctagctggcgtagcgattggagtaagtcagcctatcttactggtggctcacatggctgtgttaacattcgtccagctgaaattagaagtgtttggaacaacgttttaactaacgatgctgttatcgtatattaaaaaataaagattaatcgcctacttcaattgaagcgggcgatttttttgcgtaaaattaacagaaaagatatagatttttgaaaggatcaaatatgttagtcatcggtattatttgcttggtggttgctgccatttcttactttaaataccttagtgaaaagaacggacaagctaaccaaaaacaagctgaaaacaaaaatgaggcaaaatggcagcgcactttagcaatcattttcctcgttttcggaattttattaatcggttattggattgcattaatagagtagagggagttttataactcgcccctctcattgcaccggacgtacggttccgtatccggcgctacgtttgtgattatttacgagataaataatattctagcggatcgaccaagcctgggcgatccgctttgcttatgcccaatacttttgggctaagcagaaagttaatgacataacccgtacttcttttataccaacctaagcgcgtattagctactttatgaatatcttcatcactaaaattgcactttagtgccttgttaatccgcattaagttaatgtatattcgttttggtagtttccattgtttaatgattaccacccgtactttatgacgcagccattgactgaacttaattagaaaatatttcatgtcgccaactctaaagtaattgacccagcctctaactacttgatttatcttagtaaagactagtgatagaggctgagcagctgcttttctgcgacagagaagttctctcatcttgtcataaagcttgattttgcggtcatctcctggctttgcttgccagtattcgccacttttccagaaggtaaagccaagaaagttgctcttggttggtcgtacaactttggttttggttgcgttgacctttaggaatagctttctttctagccatgatgaaattgaattcatcacacgtttggctgatttaccgcttttgacaaagatattgcagtcatcggcatagcggacaaagcgcaggcctctttgttccaattctttatccattttatctaaatagatattggatagaattggtgaaagagggccgccttgtggtacacctagtttattaggcttaacccaaccatcttccattactccagctttaagaaaggctcgaattaaatggagggtggttttgtcatttacttgctctctaattattgaaattaatttatcatgatttaccgtgtcaaagtatttctcaatatccaggtcaacaacccattgatagccttcgtttaaatattccaagacttgttcaatagcgtcatgagcactgcgtccaggtctaaagccatagctatgctcactaaaatgaggatcatagatcttcattaatacttgggcaatagcctgctggattactcggtcaacaaccgtgggtattcctaaaggacgtttcttaccattagctttaggaatgtagactctgcgaacagcttgcggacgatacttcatcttcatgatggcgtcctttatttctacttgatgctttttaaaatagctatcaagctcatcaactgttctcctgtctacaccaggcgctcccttattgattttgactctcctgattgcttccttgagattattttgacttaaaatctgttcaattagttccatctcgtgatatctccatttctacttgtaaatttattcagaattgtcccaattgctttcaccatcaaagagttacgttctctttgtgctaggctatcctcttatccggactgtctgaacattgcttatagcgagatatgctcttacaaacattaggcccttcgctccagtttcattacaaaaccttcagcactactacgacctcagctgacttctcgcgattaacctttttcgaccaggcttacgatcgctgatattaaagcttactcggtttcacctgtccacgagatctctcggggtaagacattcatctttaattttccactgccccctggtttaccgtcttggttttacggttgtcctttggactttaacttgtgctgcagtctcatccaccatttggcctgaccaggtttctgtacgtaggctcggaaaactcgctagccacttccttcacccatagcgtcaccgctaacggcttgtggttcgctacacttggcgacaactacccgtgatctagactttcactagactagacaaatgccatgcccgacacaccgctaaaaaagacgtgaattttcacgccttttttaaatataattgattaccacattacccatattagctcttccctttaaaactaaggtaggaccgccgccattgctttttcctttaactattacattaccaaggctaatgcttaattgattatcaatctgccatgataagggaacgtagagatttacatttcccattgaagcagttagattaagcacgactgtatcacctgctgctttagcatcatcaagatagatattggcattaccgaatgaagcttcaagattaattgactgtaaattttgtgaatgaatataacgtgaagaatcgccagccatcttttgattaattacgatattgtcaccatcttcaatcacatcttgaacatgatgatgtgttacttttgtctctgtatcagcatcgtcactatcatcgtcatcattccaatgaaaactcttcttgataacaatttccggatcttttttaaaaagcaagctcaatcccattgaaacaagcaaagcaataaacaaaatcatccaagaggataagaactttttaatgcccaggggacctgcataagtaattactaaaaaagcaattgagaaaacggacaccacaatgctcttatcaagcaagcccttaattaagcaagccacaaaaatgactgtcaaaataattgtccaaacgctaattttgaagcttaataagcctaattgactgatcaccaaaagcgcagctgcagcgattagtcctactccccacaaaattcttgcaaaactgtttttcattataaagaccttctttcatctaagcgtgtgcgtaattctttgtagtatcgacgggatgcatatacagttttataagtatcatgaaactgtatcttgcaatctgaaatcgaccgagttaaaccataaatttgatctaaattaataattgtcgatttggaaatccgcatgaaacctgcgcccaaaatattttctaactcatacaatttatgtttaaccaagtatgccttatcttgtgtatgcaaaattacctgcttggcatctgtttcaaaaaacaaaatctcgttcagtggtaagtagtaagaaacattgtttctaaaacattcaatctgatcattgtgttcaataccttgtaatttcttataaagctgctctatttccggagaaatatttttagctttaataatcagttcatcttctacggcatctggatcaatctcaagttttactttcatgtttctcactcccttctgaatctgatatttatattaaaaaatatttcagatagcttttccatagttttgaactaagtggtaacttttggtttctaagtggcaaaaaaataagacgacctctgtcgtcttattgcttattatcaatgtaaactagtaaaaaatgttatcagtccaagatttgattattttttgctttctactgcatagattaatacttaatagaataatatatgagcactactataaaagatagtatgacaaatacgctagccaacgccataaatgaaacattaataattatcacgctacttagctttaagtaatgttgactcatcacaacgatgatcatccataaaccgatgtttaatactacaaaaaactcaattactttaaagtttaaaacagttacattatatttttgactagatatcttattactcttataccccagtatatttatattctggttatgctgaattgcacgtatgaaatattgggaaacatatactaaaataacttcagcaatactaaacaaacctagaaatatattgtgaatccacattacgtttatagttaaaatacaaactatggccaataatgcaattatccaaaaaagtttgtttattaattgatatgctaagtattttatatatttttctctatccattaatctttacctttgaaactgtcaaatcttttgtgtaaatagatctttctcgtaaattgattttttaattatttatttaatcaaagtaggattctaaggtgtcctgaacctgaccaaagcctttatgaattcgattgaaataacggtcattgtagctcattgcctgaatgccaataaaagcatcaagcgactgttcagttggaaactctgccttaggcttagctttgcgcttgatcacattgttaaatgattcaatcatgttagtcgaataaattgaagctctgatctgcttgggatagttataaaagaccagcagatctggttctatgtctttcaagcttctgataacatggctgtaaaccttgccccatttggtatagaagtcatgcaggacagctgtggcttcttctttgtttgtctgttgatgcacctgtttgaattcgttcatgatcttttcacgatcgtcgacgcgtactttagcgcagatattgcgcatgacatgaaccaaacagcgttgaaaatgagctttaggataagtcctggccaaggctgttttcatgccaacaacaccatcagaaagaaaaagctcaacttgctttaagcctcgggatttcatgttttgaagcatatctgtccagacttcaatgttctcgctaggcgcaatgcagtagtcaatgacctccttgtgcccattaggcttgatgccaatggcaatatagactgcttcacgctcaaatgtttctcggcgcaaaggaaggtatgtcgcatccaaatagacgcagaaaaacttgtcgcttagcttgtggtaagcctcaacctttggaatcatctgcttggaaatatttgatacctgagctggactgtaatggctgccatacatcttttcaattagatcggctatttccctggtggtcacgcccttggagtaaagcttgataatcatgctttccaagatatccgagtgctgcttgtagtcaggcagcatgtgctgatgaaattgaccgttgcgatcccggggcacttgcacttcaattgggccaaattgcgtatcaactttgcggaaataagcaccatttctagagttgccagtattccagccatttctggcatagggatcatagcccagaaaggcagtcaattcagcttctaacaagttattaacagcctgttgtagctctttgcgcaataaatcatttattttgtctggattgaatagagcttgagcaaaatctttggtaaaatcattcatgaaggagttcttctttctgtatgtgtttttgtgttcaaaccaatcatacgagaaaggaactcctttttctaatgtttaaagaaataaatttaaggaatcattcatccttacacaaactattttacagtctcttaactaaagattgataaaaagaaaatataaaatataatgttaacaataaatcacaaattctaaattttacttttgtaatcaaataaaagcttaaataatcaaaaaacacccatacgattaaactaaatatacttacaataagcgttactaattctaatttcatatttccaccgttaattagtatttttagcacatcttaaataaaccgactatctttcagtatagcatcctcagtttatatgtaacaaaaaaggattctatccaagtagaatccctattttagtggacaccctccattagtacattaatcttcttaaccaagaaaaacataatcacggcaaaagctacactaactaagccaaccgccatgaaatattgtacttcagtgccagttgaatagaacttaacaatttgtgcattcactgcttgtccagttgcatcagccatgaaccacatactcatcatttgcgaacgatatgcattaggggctagcttggtcgtaattgataaaccaattggtgaaatcaacatttcagcaatttcaactaagaaccatgaaccaactagccaaaatggactaaccttgcttgctgtaccataaagcatccctggcaaagccatccacatataagatagaccagcaaaaactagccctgctgcaaacttgcctggagctgttggctgctttttccaatgttcccaaagccaaacgaagattggcgttaaaatcataatgaataatgggttaagagactgaaagttggctgctgtaaagtgccaattaccaatatgaagcacggttctttgagcggcaaacagagctaaaactactgagcctgattcttcaatgccccagaagatagctgcagcaaagaacaatggaatgtaagccttaactcgtgaacgctcaaccttagttacttttgaactacgtagcatcatcacaaagtaataaattggcagtgcaattgctaaaatagtcaataaagtaatgacattgtcaacgttcaattgaccaaagccggccattgcagctaatacaagggcaatcaccacgaacccaataactacccacttaataatattaagcaagtcacccttatcaataggatcattaggcgtcaaactttcaggagaaaggtattttttaccgccccaaacatattgcactaagccaaagaacatcccgattgcagctaaagaaaagccggcatggaagttcatttcattaccaaaaatatgaaagccaaaaccttgtgctgcccatggaactaaccaaggtgcaagaaatgatcctaagttaatcccaaagacaaagatgctaaaacccgcatctcttctgcgatcttcaactgaataaagaccaccaaccatgtcagatacatttggctttaataaaccagtaccaaccacaattaaggcaattgaagcatataacgccgttacaccggctggaagtgccaagacaatgtgacctaacatgatcaaaacgccgccataaaagacggtttttcttgaaccccaaacacggtcagacagccagccaccaactagggttgataaataaacaagtgaaccatagattgacatgattgatgcagccgttgtttggtccattcccagaccacctttggtgactgcataatacatgtagaaaagcaggatggcgcgcattccgtagtaactgaagcgctcccacatctcagtaaagaataacgtggacaaaccctttggttgtccgaaaaatgctgtatctgaatctcgtttacccaaagaaaaactcccctcttatctaaggtaagcaataaaggatattataccacgaaaaataaggatctacttcttacatcaatgtcattaagttaagattgacaaattgaatctaatctctgtagaaccgaatcattatgatttagttctttttttgcataaaataaaggcgaaaagaacctaccttttcgccctctgattaaattattaaaccttcaaaattattgccagaaagctggtgttaattatgaaagcccttcataaaaatattttagatcgtcttgatcaaattatcaatgatactggaaagcatattcatgattttatcgatgatcctcatgccttcactaggaagcggtctttagatgcagctacagtcattaaaactactattaatatgcaaggaaaagatttgaccagtgagttgtttagagcttttggccaaaaagctattaaaaataacgataaagtagtcagtacttccgcttatgtccaacgcaaaggttcacgccgttgacatgcacaagactgacctggacggcaaggaactgaccagctacaagctgcaaaaggacctgcgattccacttcgacaactagtacaataacagaaattagccaatatacagcaaagtgtctgggaagaaactcgatttttagcccggatataaaaacacagaaattcattatttttagtgaattcctgtgttttttgtttttgaaatgaaaattcgaaggcttcaccttcttgttggctccatattttttcttaaatgcgttctgcgcataccaaatacactcttcatgtgcccaaaaattggctccacatctgacttgcgacagccatagatgcgtttaccttattcgctttgaagagtctcttttgctttttcttttaaatactgccaattaggattgtagtgaatctgtctttgtcgacctgttttggttttagccaattgggtcagttcttcagttagctggaactcatcagcttcataaattttgaagtttctgaccatgccagtaaatcgatcttttctttgactataatatttgaagttgaagcggacgcctgatttatctacgtaatagtcttcttcttcgttatagtaccagttgtcgacctttgatggatctttcttatattttcgcgtttgttctttttcgtattgggtatacggaatctgatagttcttatctgaataattctcttccagaatcgagtaattgtattcactgccatagcccgcatcggccacaatattttgaaacttatcgaaaattcctctggacttcatttgttctagaaatagttcgaatattctaaagtcagccggattaggaaacagggcaaaatcaactatatattgattagtagtcgctgcctgaatattgtagcctggctttagctgcccgtttttcatatgatcttctttcatatgcatgaaggtggcatcatgatctgttttagagtagctgttacggccagcaaagatctcttcagcttcttcgtactttttagcacgcggaataaaatcttttctaagtttatgtgcgatcttctttaattcacggcgcttggccttattttttgatccgcctggaatggctttaggttctcgatcaattttctcggtcagcttctcaacttctttttccgtttcttgagccagaatctctaagccttgactagtttgggcttcttcttcggccatggctttgactacttctttattgatcagttcttcatataaagcagacacgtcttcctttaacttggcatgatacttctcaatagcttttcgccagacaaaagtgtacctgttggcgtccgcttcaattttagtaccatcgataaaaactgcattttcacggattaatccctcatcttctaataatgaagtaaagtagacaaaacactgcttaattaccttattggcatggtcgcttgatctgaaattattgatcgtgtgataagaaatctttctattgtcagctaaaatcatcatgggcagattctcttctagcattctttcaatttttctgcctgaaaaaactcttctagaataagcaaagagtaaaatcttaagcatcattgccgggtgatatgcaggtctgcctgtattagaagtggtttctaagataacttcgttaggaatagaatcaacgaattcactgataacactggcaatgtgatttgcagggatagaaaaatctaaatttaatgataaagtagtttgtcctgtgatataattttgatacatgtttaagcccactttctattgtttttttgtggtgattaaataatatcaaggaatgggtttaaagtatacaaaaagagcgatgacttcttatgaagttcatcgcttttttcatggcctggaaattagttttttcccagacactttctattattaaactagatcatacatttctggcattctgcaccattttgaattaaacattcgtctgcagtcaagttctcactaccagctaaaactttttctcttattctaacataataaattgagttgcatcgctttttaaaggcataaatataagccttatttaaatctcttgttgttgcattatcttcaacaaataaagttaacgaaattgattgatcaacatatttttgtgcagcagctgtaatatcaataatagcattaggtcctacttcatatgcgcccttttcgtaatactcataattgtctttattaatcttataagctggtacataaattcgacccaaatcagcctctttgcgtgtttcaacaggagctactactggctgcaaacttggtgtacatgaagataaataactaattgatccagtaggtgcaactgctaataagttagcattagctatacctgtctttttaattttagtaatcaattcttcccaatcttctttagttggaataactaatttatatttagctacaatttctttaatcttgtctgttttcggtgagacttcctcatcaataaattttttgaaataatcaccactagcatatgatgaatctttgaatcctttaaaagcaccatacttttcagctaatttatttgattctttaaatgcatggtatgcaattgtataaaagaaaattcctgtaaattcaactgcttctggtgaatcataataaatatgattagttgctaaaaagccatgtaaattcattgctcctagaccgattgctcgattagctttatttcccttttcaattgaaggagcacaatctaaatctgaagacctggcaacacgattaagcgcttgaacactatcagaaaccaaactacctaacttgtcagcgctattcattgctgctgcaatattaagtgatcctaaattacaacaaacatcgtagcccgtcttattaaaacttaagtcttcattataggtacttggcgtattaacctgagcaatttctgaacataaattagacatcacgatccgccccaatttcttttgtgggtttcttcgatttacagtatcttcatacataatataaggataccctgattcaaattgaacttcagcaatagtttggaagaattttctagcactgataaatgtctttttaatacgtggattattaaggagattttggtattctttagtaattgaaatatctgacattggtttaccatattcacgtttaatatcatatggtgaaaacaaagccatctttttattttctttggctagttcaaaagtaatatctggaatcactacgccaagtgataaagatttaattcttaccttttcgtcagcgttttctcgtttagtatctaaaaattgcataatctggggatgatgggcacttaaataaactgcaccggcaccttgtctttgccctaattgattggcataagaaaatgaatcttctagtaatttcattacaggaattatcccactagataaattcttcatttttttaataggtgcacctaattcacgcaaattagttaagcatagagcaacaccaccaccacgtttagataattgcagacttgtgcttattgctcgtgaaattgattccatattgtcttcaactctgagcaaataacatgaaatatattcaccgcgtctctttttacctgcattcaagaaagtcggagttgctggctggaaacgattactaataatatctttaactaaattcaaggccagttcttcattgccatcagctaaaaataaagcattcataacagcccgatcttcaaaacgttctaaaaattgtttattatcgtttgtttttaaggcatatgctttatagaatttagctgcacccataaagttcaaaaagctaaaattttgtgcataagctaatttgaaaatttctttaataaatttagctgtatataaatctagaacttttttatcatagtaatcattatcaactaaataagctaatttttcttctaaagaagcaaactttttcattcttggttcaatatgattttcaagatattgcttagtagcctccttgtcagctttaaaattataatttcctttttcatctttaaatttagcaagtgcatttaaagaaatatatgaatcattattaagattatcagtcattgtcttcacctgcatcagcaattattttattaacattatttacatcttcagttgttcccagtaactcaaatttatatagataaggaacatgtaatttcttagaaattacatcccctgccaaggcaaaagaattaccaaaattggtatttccactagcaataacaccaatacatttttgccgattagccaatttgttcaaaaagtggataacttgcttaggcacagcacctgtagtcccatggccaccagaataagttggcgtaattaaaatatattcttcagaaactgaaatttctttactgagtttaataggaatcctaatagaattacaatctaacttttctacaaaacgtgctgtattatttgaagtggaagaataatagacaactaatggctttttagaaatcccagtcatcatctgtagtctcctctcctgttcccattacatatgaagaaccattaccagaaaagaaatcatggttttcatcagcttgagctgataattgagcgaatacttctggagaaacataagtttcttctgcggtaaaaggagaatcatagcctaaattttgtaaaaatttacctgcattatacaaactgaaatgaattgcatcatcaaccaaatcaaaatcatcataaagctcgtgcaaatatttcttttccaaatcaattagtttatctaagaaatcaaaaacaaattttttcatttctgcttgtttagctggagctaatttctttacggccaattgatatttgtaaccgctataataattgtgaataaccttatctcttaagatcaatctaataatatcagcagtattaggcaatttacctcttgcagctaaataaaatggtaaataaaaaccaccataaagcaggaaccctggcataattgctgcggcgacctttgatttaagcggatcattgcctgtataatacggaattaccgctttagctcttgcttgtaaagtatcattattaactacccattcatgcgcttcttcaatttgttcactagtacataaagtagaaaaaatagttccatatgatcttgcgtggacagcaaccataaaagcaaaatttgcatagatagcttgctctatatcagtttgtgaatttttaatttgggctacatcacccacacttgattgagttgtatctaataaagtcaatccagtgaaagtgcgagttataagctgttgccagtcatcagataattgattccaagaacttatatcattcgaaactgggattttttcaggtaaccaaaagttttgagtaactctgttccaaacctcaagatccttatcatctttaatgtcattccagttaatagctcgcatatttttgccgttgtcattgtaagcaaattcaactggtgactgtgaatgatcataataactcatatatttgctcctatcattatttattgttttatctaatatatgtgtaaacatactatagcatcgtctgctcaataatacaacatgtggatttttggggttatttataatcgatatattgtggttaagccgttttgataatacaaaattattttcaaatttattttatcttccaaaaataatgtaggtgttgttttttgcttttttgacaaaaaaagtgtctgggaaaaaagtcgatttttaactaaatttaggctttaactcaaaaaaatcccattaaatcaaggtttgtatgtaccaagatttgatgggattttgaaatttctgagttttttcccagacacttttttcatggcctggaaattagttttttcccagacactttcttttgcgatttttgctttatttgttagtaccatctgctcctactggcagggccgggaaaataaccgtgaaggttgaccccttgcctaattcgctttccaggcggatggtcccgtggcactgctgaacagcatgcttgacaatggacaggcccagaccagtgcccccggtcttgcggctgtagctcttttccacccggtagaagcgttcaaaaatccggttctgggcttcctggggaatcccaatcccagtgtctgctacctgcaggatcgcctggccccggtgctccttgaccgtaatcttggtcttgcccttttccttgttgtagcggatgctgttgtcaatcaagttgtaggcaatttcataaaccaggcggaagttggccaggatcatggtgtctgacaaattggtctccagcttgattccatgccggtaagccgaaccctgcaaggcttccaaggcctcagtcaccggactcttcaagttcagcttgatttcttcaaagcgctggttttcatccaagtgggacaaacggatgatatcgtcaatcaaggtcaaaagctgggcggaagattcatggatcttcttgtaaaagccatcccggtcttcgtctttgaccaggtggttttccaaaagctcagctgaccccatgatggactgcagaggcgtcttaagttcatgcgacacattggccgtgaattcccgccggacctgctcttcatggtattcttccgtcacgtcaaccaccaagatcgaagtccccttcaaaatcttgcggctgataatcgggctggcactgatttgaatattgcggccgtttctttccacaatcccctcagtatgagccaagcggctgtttttatcgatgatttccttaacatcgtctggtaaggggtcagtgtcatgcaggcctaaaagtgaaactacagccgggttagacaaaagaatccagtcatccaggtcaatcaagatcaagccttcttgcatggcatctgttaccgtctttaattccttttcccggtggtgcagctgctccatttggtcagcgatctgcttgttctggctgtccagcctggtcaagagcggcttgatttcatcataagccttgctttccaggggcttgtccaagtccatttcattcagcggcttgacgatcgtttgcgagagcgtcttggccaggaaccaggacactaaaaccgccaaaagcatgatcagcaaaagcggcgacaagagcctgagcagcatccgccagaaggagtttctggtgatcgcgatgcggatgaccccgccgttattgagccgttcagcgtagtacatggtcacggtcgacaaggtcgtgctgtagcgctcgctggtccccgtccccttcttcatggcttcggcgacttcctcgcggcgggcatggttgcccatctttttgggattctcttcattgtcgtagagaaccttgcccttggaattgatccaagtaatccggtagttctccccttttaagttcttgaggtacttcttgccgctggtatttaccccgctggccgccaggtcagcctgggaagctagggcagacatttctgtatggtcgaagtcaatgctcaagacaatcgtgcttaagagtacggcaaagaagagaaccagagaagtcagtaaaaaacttgcccgaaatatcttcttaaacattagtctgcttcatggtagcgataaccgaccccgcgcagcgtttcgatatacttaccagcctcacccaacttctgtctcaaggttctcacgtgaacgtctaccgtgcgcgtttccacgtaaaaaccagtctcccagatctgatccatgatttcttcccgggaaaatacagttcccggatgagtaatcaagagctttaggagtccgtattctttcaaagtcaaatcgacctgacggccgttttcgaaaacttcatggcgctttaagagaatcttgatcccgtctttttcgatcttgtcctccttcttgcggttggtccggcgcaaaacagccttgacccgggaaaccatttccatcatcccaaatggcttggttaagtagtcatccgccccgaaatccaggttcttgaccttgtcatattctgccgtcttagcactggcgataatcaccggcaagtcctcggtcgcggaagtatacttgagccgttggagaatttcgctgccgtcttcatcaggcagcatcaagtccaaaatcactaaatccggccggttattgtccaggaccttgaaaaaagaatgtccgtcttcaaagccgcggaccttgaagttcattgcttccagcgtgtacatttcgatttcgcggatgctttcgtcgtcttccacgcaccaaatttcagtcataaaaaattcccttagcctttcttaaacttatttatagtttaccatttacaagagtgttaaggggtatttcatgggattatctgccagtcttgccggtagttacaaataaggaccatttagcaatattgacggcgtgatcgccgattttttcaaagtacttcgcgaccatcatcaaattgatcaaatattccggattactatccttgttaaagttatcgatcaaaaatgccttcgctttgccaaagtcgtaatcgacctgatcatcgcggtcgattacggctttggccagttctacattctggttggccaaagccgttaccacgtcgttgaccatacaagtagcaatttgggacatgctcttcaggttcagcatgtcatttgcgtctgagaggtgttctttaaggatcagttcggcaatgtccgcgccaatttcaccgattctttcaaggtcgtagaccgccttcaaagatgcactgattatccgcaagtcagtggcaaccggctgctgctccatcaaaaggcgcaggcaggtttcttcaatgtcacgctctgccttgtgaatccggtggtgcaggttaatcgtgtcctctgctttatggtagttgcccgtaaacagggcgtcggttgattcagaaatgctttccttgcacagctggccaatttcttccattgcttcatgcaagtgatccagttccttgtcaaatcttgttctcatttttaacctcctatagccttaaccgaaccggccggtaatgtatttttcagttctttcatccttcggcatggagaagagctggtcagtttcaccgaattcaaccaggtcacccaagaggaagaagccagtcttgtcagagatccgcacggcttgctgcatgttgtgcgtaacgataacgatcgtatagttcttcttcagttccaaagctaattcttcaattttagaggttgaaatcgggtccagggcactggtcggttcgtccatcaacaatactttcggcttgacagccagggcccgggcgatgcagagcctttgctgctgaccgccggacaggcccaaggctgatttcttcagccggtccttcaagtcgtcccagatagctgcttgcttgagggaagtttccacgatttcgtctagttccttcttctcagtaatcccgtgaatccgcgggccgtaggcaacattgtcgtaaacgctcatcgggaacgggtttggtctttgaaagaccatgccgactctttgccgcaggacggtcacatccaggtcaccgttatagatgtcagtgccgtccagcttgatcgagccatcaatccggcagccttcaaccaggtcgttcattctgttaagtgatcgcaaaagagatgatttcccgcagcctgacgggccgatgaaggcagtgacttcgttctttggtatgtgtacattgatgtcatgcaaggcatgaaaatcactgtagtacaggttcagctttttaattgtaattttgtcttccatcattaatttcctccgttattgcgcttgcgcattctgtcagagatacggcgcgtaaccaaagtgaagagcagggtcaaaacgaccaggactgctgatgtaaagttggcaatctgagtggctgacgggttcaaggccccttcagttctcatggcccagatgtgcagggacagggtttcaccgcttcggaacgggttcaggggtgaacttggtgagataaccttccagaagttctgccagttgatgtaagttgactggccggaagtatacaaaagcgcagcggcttcaccgaagccgcgcccagcagccatgattaccccggtcaagatctgcggcatggccgccgaaatcaagaccttgcggatggtttctgacttggtcgcgcccaggctcagggaaccttccttgtattccaccggtaaggaccggatggcattgttggtttcagtagttatcagaggaatagaaagaattgaaatcgtcaaggcaccggccaagatattccaggacatcccggtccacatgatgaaggccaagtagccaaacaagccgataacgatagatggcagggatgacaaggattcgatactgatttcaaatattgtcaggaacttgccttccttggcatattcagccaggtaaaccccggccccgatgccgattggcactgagaccagcagtgagaggaaaactaagtaaatagtgttgaaaaactggttgaaaatcccgttgccggctgctcccaagaagtcccactggaagcctttcaagccgtcaaagatgattgtcagcattaagtagagcaggaaggccagcataatccagccgatggcgtagaagattcccgtcatcagccggtcttttattttagcacggctcatatttatttttccttctttccattgccaagcttgtgaatcaatataatcaaaacgattgagatgacgaagagcaagagagccattgaccacaaagccagattgtattccccgccctgggccgtgttacccatgtcagcggcaatctcactggtcaggttgctggttggtgacaagagactggtcgcgaaggaccgggtcttaccgataaccatggctacggctaaagcttcaccgatggcccgggccagacccaagaccaccccggtcaagataccgccggaagcggctggcaaaacaaccttgccgatgacttgccagcgggtcgcccctaaaccgtaagccccttctctgtagctattcgggactgacttgatggcgtcagcggcgacagtagtgatcgttgggaaaatcatgatggccagaacaattgaggcggccaggactgagaaaccgcccatctttgggtggaaggcgtttctgattataggaaccagcttggtcaagccaaaccagccgtaaacaacggatgggatgctgacgtagatttcagttgccggccggaagaacttttcgccgatttttggtgaaatttccgtcatgaaaacggctgagccgatcgcgaacggcaggcagatgaacaaacccaacaagcaggtttccagggaaccaacgatgtaaatggcagccccaacttttcccccgaacatgccggtcttgtcaagcggtgcccagtcactggtaaacaggaactcccaaacgctgtagtgcgccttaaggaaggtctggctgccttggtagagcaggaaggcccccataaaaagggtcaaagcaacgatcaagaggccgcaggcgatgtagtccgcgcgccagcgcttgtctttggcaattgctttttgaactactttgtccataatgctttatttctccttcttacttattagcatgggtggctttagcggcagccagcagtttggaggctacgccgtagcccatggcttcgatcttcttgctatattccttgctaagcatctgctgcaagaatgccttggcagcacccttgggctggcccttagtgtacatgtgctcatagctccaaactgtatacttgccattatagacattcttcagggttggcttaacaccgttgattgacacgatgccgacttgcgggtcaccagtcaagtaggacagggaaacgtagccgattgagccggaaacactttggatcatttgaaccaaagtacctgagtcgtcagtttccagagactggtttgactggctagcgtgcttcttcaaagcgtattgctcaaaagttgcccgggtacctgatgaagatggtctggaaaccaggacgatctggcagtcattgccgccaacctgcttccagttggtcaccttgccggtgaaaactttgatcaactgttcagtggtcaggcccttgactccagcatccttgttgatgatcggggcgatggcggtaatggccacttggtggtcaactagcttgctggctgacttcttgtctagcttttcatccgcgaacaagtctgagtccccgatgtcgatggtgccgtcagaaacctgcttcaggccttggcctgacccacccccgttagtgttgatgacactgtccgggttcttgtccatgaaagtcttggccgcgctctgcgctaaaggcagaagggcagatgacccggcgatgttaactgtcccggaaactcccttggtatcggctacgcagctgtcgatgacgcagccggtgacgattgccagcaaaacaagtgcaacgatggcgactttggtttttttgcgtgacatgttaattcctccttgaattcttactgattcaaccttaatggaggcaagttaaatgcattcagtgatgattgttaaatcaatgtaaaatgtttaattttatttaagcccagccgctttcttaacagaatcacaaagttttcgcaaggctcccctttacttttcagtttattttgcttaatttatccgttttttacatttgtaaaatatagagctttcactctttacaccttttacatatcgcgcaatattaggatataagtgttcttcttcagtccactcaaagaagcgtttaaccgcaactatataattctggattgtggtcggtttcttgccacttgcctttaaaaattctctgtactgtcttacagtgtcgggatctggatgcgtgatccccttttccctcatgtagataaaccattgcttcaatgaagttcgataagtcctaactgtattaagcgaaccatcaataaatatgacaaacttatcaaaaagatcatccaagttgctatgctgaaaatccaactgctttgagcctatcgaggttaccagttcaccgcttatttttcttattggttttatttctaccatcctaacattcacctactttgttactatgctagcttattacattgttatcttgctatattgctataccagcattgtattcttgtagtatcagattacttcagcataatgttacatttttgtcccctaatatgacttcgaaaacgggcttctaagcttaatatacttgttatatgttcaatttattcataattgttaaaaaagctctgaaaagcgaatttatcatgcattatggacttacaccgctccttatgctgaataccttccaatgttgttgggtaggggggatgcagcaccaatatcaaccaaataaaaaggggctagctctgaagctaacctcattcattaaacattaaaagtaaatttataaataagtcatacttgggtttttatcgctatggtttgggtttaaacacgtgaaattgtgctttatattaataccctgcatctgcaaatattgaccaagcagagcttttaatctgtcctgcgatctattattattgttttggatattcattttatgtataccttcatttttataaattgattgagtggtaactggtcagagttgctgctcattttattttgccaataagtcagccaataaggtggtagaagctgtacttcgtactaacaatattaacgaacatacttagaatatagggttacgggcaatgtcattaagttaaggcattgacttttttacctaaaatcaacttgattagtgggcgtttatttactttgaaagtctatcctaaaacttgacaggagggtttaatttgagcgaagagaatcaaaagaagctgtttggcatctcagcgattatttgcattattttattaacgattacctattttggtgatttagccatcagcaataccttaattaattatcacagctgggtagggacgttttgtcagactttttgcgagtttccggtttatcttatttttgccttatgtggacagattacgatgacttatgcctggaaaggcgactgtgaaaatctgctgggggcaggaccgttgtttgttggcgggcttgcactgtcgctttggcagagcaagaagtatgtcaatgaattcttgggctatctgtattcggtacaaactaaccttaaaaacggtaaggcgatagcaatggccaacagcgactcagtaaagggcggttatgcaggctcaatgattataatggtctggctgttgtttttcgttatatttacgctgttggtacaatggtggctgaaaaacaaaacgactaaacagctgactcgctatatgaaaattgcgattttggcgtcattgacggtttggtttgcattggaagttaatctgaccttaaaagacctgtggggacgctatcgcccatatgaactcacgatcggtaatcatgaatttaccaattggctgacgatcaatggcgttaatgggcataagtcattcccatccgggcatgcgatggcggcaacgttatgcatcgttttttcatggttcgtttccaacaataagcataagatctttttcattggtggcatcgtttatggtgtcgtgatcgctataagtcgagtaatcatgggcgcacatttcctttcggacgttacgttctcgtttttcctgaccgtactgatcatctttatcatgaatggtcttggtaaaaagctaattgaagatttttaaaaattagggctgtgaccatcgaaaggtgaccacagcttttatttatgtgttaaaagtcatgagaatacgccacctttgataaaatttctaatcaaagatagcgtaaagcggtttcaaaaattaatagagtagagggagttttataactcgcccctctcattgcaccggacgtacggttccgtatccggcgctacgtttgtgattatttacgagataaataatattctagcggatcgaccaagcctgggcgatccgctttgcttatgcccaatacttttgggctaagcagaaagttaatgacataacccgtacttcttttataccaacctaagcgcgtattagctactttatgaatatcttcatcactaaaattgcactttagtgccttgttaatccgcattaagttaatgtatattcgttttggtagtttccattgtttaatgattaccacccgtactttatgacgcagccattgactgaacttaattagaaaatatttcatgtcgccaactctaaagtaattgacccagcctctaactacttgatttatcttagtaaagactagtgatagaggctgagcagctgcttttctgcgacagagaagttctctcatcttgtcataaagcttgattttgcggtcatctcctggctttgcttgccagtattcgccacttttccagaaggtaaagccaagaaagttgctcttggttggtcgtacaactttggttttggttgcgttgacctttaggaatagctttctttctagccatgatgaaattgaattcatcacacgtttggctgatttaccgcttttgacaaagatattgcagtcatcggcatagcggacaaagcgcaggcctctttgttccaattctttatccattttatctaaatagatattggatagaattggtgaaagagggccgccttgtggtacacctagtttattaggcttaacccaaccatcttccattactccagctttaagaaaggctcgaattaaatggagggtggttttgtcatttacttgctctctaattattgaaattaatttatcatgatttaccgtgtcaaagtatttctcaatatccaggtcaacaacccattgatagccttcgtttaaatattccaagacttgttcaatagcgtcatgagcactgcgtccaggtctaaagccatagctatgctcactaaaatgaggatcatagatcttcattaatacttgggcaatagcctgctggattactcggtcaacaaccgtgggtattcctaaaggacgtttcttaccattagctttaggaatgtagactctgcgaacagcttgcggacgatacttcatcttcatgatggcgtcctttatttctacttgatgctttttaaaatagctatcaagctcatcaactgttctcctgtctacaccaggcgctcccttattgattttgactctcctgattgcttccttgagattattttgacttaaaatctgttcaattagttccatctcgtgatatctccatttctacttgtaaatttattcagaattgtcccaattgctttcaccatcaaagagttacgttctctttgtgctaggctatcctcttatccggactgtctgaacattgcttatagcgagatatgctcttacaaacattaggcccttcgctccagtttcattacaaaaccttcagcactactacgacctcagctgacttctcgcgattaacctttttcgaccaggcttacgatcgctgatattaaagcttactcggtttcacctgtccacgagatctctcggggtaagacattcatctttaattttccactgccccctggtttaccgtcttggttttacggttgtcctttggactttaacttgtgctgcagtctcatccaccatttggcctgaccaggtttctgtacgtaggctcggaaaactcgctagccacttccttcacccatagcgtcaccgctaacggcttgtggttcgctacacttggcgacaactacccgtgatctagactttcactagactagacaaatgccatgcccgacacacagcaaaaaacactcatcaaattctgatgagtgttctaagacgttctccgttcagagtcaatgtcttaacttaatgacattgcttcttacatagtagatccttatttctttagctatttattttttagtcaattgccttagcaactgcactgtttacagcatctttttcgtcttcgattaagttaaccttgccttcgatgaccttaatgtccatcttaatttcacgactaagaagtggaacatttaccttaggttcaaagaattccttgaattccttaagtctttcaggagtatggaagacaccggtagtaactgtgataaatgtagcgaattccatgtcaccaccaacagtcttgtcaagccaatcccagtcttctctgatccagtcccaagctgcttgttgaccataatggttagcaagtaaaccacggtaccaaccacgtaaatcttgtggcttaactacgtcagcattttcaaagtcgccaacaatagccttgatagctgcaagatccttggtgctggttacagcgctgcgtaagtcaaccttgtatgatgggtcagctgttctttggtattccttaattaacttatcaactaattcagcattgccaaagttcttaacttcattgattaaaacgtatggacgaatatctgcattcattgcctctaagttgtcttcattagcagtgaaaatctcatgagctgttttaattgagtctttattttcagcgtaaagactggcacttaattcatatggacgaatttgtgcatcttcatcgctttcacctggcttaactttccagcccaaacgagcaacttgaccagcggataacttgtcataaagcttctttaagtccttttcttgagctgattcaggttcaacaaattggcgcaacttagcagcagtagcgtaaagagcattaataactacacttgacttcgagtcagcaaatttagtcaaaagtggcacaacagcagcataagaaatttgtttaccttctgctaaaagacgtaagtcttgcaataattgcaatttggcaattggatcaagttcatcaacatgagccaaaatatcatcaagcaaagtcttgtcatacttaacgataaagtgcgagttgttacctacattaattctaagtgggtgacctgcttcactacgtaaattcttgtagtaacctaagtcgatttccttatcagacataatcttaggtgccttgaagttagcattcaacggaatttgccattgtctaccaacgtctttaccttcaccaacgaagaattgttgttgtgaaagctttaagtgaccatcgctactatcaacatatgcactaactactggataacctggttgctttaaccatgagtgcataatcttgccaatatcaaggtcagttgcggttgaaagagcatcccaaagatcgtcaccagtggcattaccgaacttgtggtggtcgaagtaatacttcaagccttttcttaaggcatcgtcaccaagaagtgaacgaaccataactagcattctagaacccttagcataaacaatggcactgtcaaaggcagagtcaatatctgctggatcattgatttccatttgaattggttgaacaccgtcagtagcatctctagtcaaagctgcaggtgcttcactggtttggaacatttcccaaatatgccaatcaggttctagaccatcaactgacaagtattccatcatgttagcaaaactttcgttaagccataaattatcccaccatttcatggttactaaatcaccgaaccattggtgagccaattcgtgagtaataactgtagcaaccaatttcttcatttcaaggctagtattgtctggatcaagcaataaatatgcttcacggtaagttactaacccccagttttccatggcaccagcactgaaatctggcaaagccaattgcaatgattgtggaagtgggtatttagtttggtaaaattcttcgtaaaactcaattgcattcttagcaacatccaaagcaaagtctaattccttaggtttgtgtgctttggttgcgtaaacaccaattaaaacgccatccttggtatgggtagtctttgattgcaaatcaccaaaggcaaaggcaaccaagtaactagacatgcgaacagtttcttcaaagtggtggtagccgtccttgtccacttcaacttcaggcatattggcaagagcaacttcgccatcttcttcatcccacttaagggctaaagtaaaggtagccttagcttctggttcatcgatacatgggaatgcttgacgagcaaaagtggtttcaaattgagtaccgataatttgcttcttgacaccatcaacttcgtaatatgaaggataaatacccatcattgtatcagtaagtggtgcactgtattctacttcgataatcgccttaccgtttttgccagtttcaattttaatggcttcgtctttttccaatacatcaaaaggaacatccttgccatcaaccttaacgctatcaatggtcatgttcttttgattaatgaaaacaggattttcgattacttcaccagtaacagttgaagtaccattaatttccttttgcttacggtttacgttaatacgtaaatcataatgttctgggtggaaagtttcataaaaacgtttaactgccatatttttcctcctaattaatagatcatttacttttaattttaccaaaataagcgcgaaagcgctcaaaaaaggctatttcttgttgattgtaaggatgacgtttcagttctgtaacattgctgtcatattgagcttgtactatagaagcatagtcattaagaaataaataagttttgaaagaattaattaaatttaataaggaatgaatacatcaatgaataaacatgttaaatctactttagtaaaaatcttagctgccttagcacttgcctttgcttgtgttgcagttgcaaatgctttttctaccaatacttcaactactcaaactgttcaagctgcaagaaagctttcaaaagctgaaaaagctgctaagagatggatcgcaatgcgcgaatcaggtggtagctacactgctagaaacggtgtttgttacggcaaataccaattaaacattggctacttacatggtaacctttcacctaagaaccaagaacgtgttgctgataattacgtttacggtcgttacggttcatgggttaacgccaagagattttggttagctcacaactggtactaaaattaaattcctttaattcccaaaagctaaagaaaaccagcttagtccaattgactaaactggtttttgttttactcaaaattatcttgcttgataaaacgataaagtgcaatgactaaaactaagatcgagcacgccatccctacataggccattgttccaatgtggacagcattgttagcagcttcacgggctacttgattttccattgcatagcccacaacccatttacgcattaataccggcgtcaagacaaaactaactgtactaataattgaagtcactaacgctacattacgcgaatatggttctttaaagaactgtgctaatacgcagaatgctggagcaatcatcaatagcaagatccacataataatccagcgcccagaacttgaattcatcatctgcgcactattagtggcataacgatatgagctccaaagcgatccaccagataaggtattaagcaaactcaagaaataagatccacgttgtccataaacaccaccattattggacagaataccttgaacaagttggaaagtatcagttgatccagccgatgaaaaatcgaccgacacaacttgcttcatataagtagctaaaaacatggtaactgagccacctaattctagtgctcttaacatgcttaattttcttgaagctttcagatgaaattccagacttaaaactcgatcaggatggtgactgtgaccaatgataaaaatccctgcaatgacgatcaaggctaagataaccaatccccaccagaatttaatcatggcgaaaaataaggctaaaacaataatcgcaaccgaaatatatggtcggtcagaaaaaatattccaaaagttcaacttaacatgatggtaatttttccttgatgcatttgcgacattttgattaataatcggctgaggattactaatttttctgctgcgaaattcttcacgtgttgttgctcttgtcttagtataatcggtccgtgaacgatctgcgccggcttggccgtgctcttttttcatgcgatattcacgccgcgacatatgtgccataaactgcagcccccttctcaaagcactatagtagcacattatcacttttttgcttgaattaagaatgaaatttcaaagaaaatttagctttgttttgcatgtgctaaaatgaatattaataattgtgctttttttagaaagagataactttttgaataaaactaaatcagcaaaactgccagctggttggcatatggccttttataccttatggctcggttgctttatcactgggatgggctattcaatgacaatgccctttatttcactatttatttcagatttgggtaattattctaaactgcaaatcaatctttattcaggattagcttttgcaatgacttttattgcccaggcaatagtttcaccatattggggcagcctcgctgaccgcaaaggtagaaaactaatgtgtatgcgtgcttctggtgtgatggctttaactattaccctaactggatttgcacccaatgcaatttatattattgtaatgcgttttattcaaggttctttttctggttatattaacaacgccaccgctttaatggcaagtgaaacgccgcatgaacgtagcggctgggtcatgagtcaaatgatgacggccgggactgccggaaatttggttggaccgctattaggtggtgctctctccagcttctttggcaatatgtttggtggcgcctgggggtatcggattccattcttcattaccggtgttttaatgttcatcgtctttttaggtacaacgttcttagttcacgaagactttactccaatttctcgtgaaaagatgaagccgatgggcgaaatcatgaaaagtttgcctagcgtgaaattgattgtggtgatgtttattactaccatgttggtacaatcatcaaccatgtcaattgatccaattgtttcattatacgtaaaatcaatgatgcctcatggcggggatgttgcctttgttgcaggtgttgttgcggcaacgcctggtcttggaacgctaattgcggcatcgcgaattggacacaagatggatgaagttggaccgttacgcgtattgcgaatcggcttagtcgtcggtgccgcattgtttgtaccaatggctttgactaattcgccttgggtactagcaggactgcgcttcttattagggattgctagtgcagggatgttgccagccgcacagacggtattaactttaaacacaccaagcgaaagtttcggtcgaatctttagttataaccagtcatttcaagcagttggtgccgtgttaggatcgttaatgggatcgactatttccggtttttcaaattatgcaacggtattctggctaactggatttacgttactgatcaactttgtgcttgttttgatttttgcttggggaatttcttatcggaatagataggttaagcatattcctaaagtatggaatttaaaaatgtaataaaagagctgtaaatatcacaaaaaaatatttacagctctttattattttcaattttttacgctaccatcttttcataaatgcgatacatccgattatcataagcgcacattgaaataaccagattatagcccgcgttttctttctgccacttttcaatcgcgtcaactgcgatcttagttgcatcttctgcaggatagccatacacacccgtagaaatagctgaaaaaattacgctatgcaatcccgctttctttgccaaagccagtgaattatagtagcaagaagcaagcatatgtgcatcactagtcttgccagcataaactgggcctactgtatgaattacatatttcgcaggtaaattatagccatgtgttatccttgcttcacctgttggacaaccatgcagcgccatacattcttcaagcaaacgtggaccagctgctctatggattgcaccatcaacaccgccaccaccaagtaatgaattattagccgcattaacgatagcgtcggctttcatcttagtaatatcgcctttaataatttttatatttttcataatcatgtcctcagaaatacccaacatttctttccacccccattctaacaccaacaacatcagttaggctcagaaagaatacaaagcatattgttatttttatattacgaacttgaattgatttctatctttagtatcctaatattaagtttagcgttataggagcaacgaaatgaaaattctacgacgcagtttatgcatcatttcgatcaccttattttcttttgctttgagcattctcattcctagtgttcaagctagcaaaacagttttagatgatctcatcatatttttatatttaattggaatcgtaattctgggcattctgttgttgtctaacaaatttgattacctatcactcagtctaagcataatcttgctactcgcaactatcattgcttggatcagattcccaatgattagcattatttatactttttttatcgcttatctaatcatgtgcttactaactattttcattgccaaaaggattaagaaataaatttatgttttctaaaaaagaactaaaaatcatcaatactacattaatcatcatatatctgctttcagttggcccaacattcatcttcggttttactaaatcaaatgatttcacaagtactttctttttaattgcaaatatcattttagtttgtttattcattatcattgctatcagaattgctaaaatcaatttcaggctaaagacacaatattatctactaggcttcatcactcttatttcaataatagaactagcctaccctggactgacattaaatgagcgcattagcaattattttgctatcggcaatattattctaagcttgctaactactaaaatctcaaagaaattagtttaaatataggacacaaaatgaaatatctgaaaattccaagattaattaacagtattttgattactttacgtcatactgctataaattattgaattcttattactttaaaactacatcaggtattttcaatcattcaataaaaaataagactagcactaagccagtcttattttctattaatcaactattctttgggtgagaattgccatactgttccatcttggctacggtatgagccatcactcatctttgtaaatataaagacaacttttttcgtcctaattgtgtaaccgttttttgattcagttgtatcaactcggcccaaatcagccttaacacctgtttggggtggattatttttcttagtagaatatgcttgtaaaatttctttattaagtttagtcttcttttgctcagagttgttactatttttagcaactaaaatagcatgattctttgtaaaatacagatcaaaccaattacttaagcgattttctgtgttgtctactgttaatgttcgattaacccagtttttaggtaccgttgtttgattattgtagaaaaacattccaccaataactgctacaagtactgtaactactgcaattacggataacgtcattttctttttcataatacgtttcctcttaaattcagcattaattatttggcactaagcctctcgaaataagtcttacatttcctgaatacatgctaacccatcggtttctatttgttttaaaattgtgatccatccaggtactgtttctatacaaatagccactgtaggcaccatcattataataaaccttagacggagttgtattaagtaaattcatagcatcccctttaccccaactactatatctataaacattagatacatacttgtgaagtggagcatttttgatcggtccatagactttgactcccttagtttcttgaaccgtagtttctgatgcttgaacacgttgattatttgtagccaagactgtagctgcagttacacctaaaagtgtagcagttgtcaataatacttttttcatttttatttctcctcgttttgttctaattttaataatacttttttgcgagccgaagctggtgcaggaatgttcttaacatcataactgtatagataccgtctatacagagtagtagcactttttcctactttttcacgcataacttttgaaagatatcctctatatccgttgtattcaaagtaatgagtgggaccataatcgcaacttgaacctaaagtgatccaaattctcttaggcttatagtaatctgctcttaattctgaacttacagttgattgtgtttcagttgatgcatcaactttgcttgaaaatgtaagtaaagttgtaccaactaatcctactaatgacaatgaaactagctttcttgaaattgatttcatttttatacctccgtaattatcaaatgacttatacaaattatctattctctttttctcccatcctttcaacacctggcttgacatttaatttaggtatttcaaaagtatctatactgcctaaaatgacaaaagccgttataattgtaagcgtaagtttgtttctttttcttttcatcattgaggtaatctttatgtacggtaaaaaatttaaagaaatcagaattaagcagaatatatcattagaacaagcagcaaaagatgttgtttcaatttcaactttatcacgctgggaaaatgataaattagacatcaatttttctcaactaaaccacttactcgcaaatatccatttaacattaagagaatttgctagatattgtgaaattaatccatccgatactttctcaattaaagctgcaaaagcatataattcagatgatattaatcagttgcatgcccttgctcaacaacaattagataaatactatagttccagagatagatacgatctatttttaacagcaattgctaataattattattttgacctgactcaaaaaaatattttctcgcaagaagatataaatcgattaaattatctacgcgtggtgctagttaaatctttctagacaataagccaaattataagctaaaattgcaatttccaaccggctttgaaagcctatcagactacgtgctcgattgttctcggcattgtaataggtcagaagcgaaaagtcgctttcaattgttctgcgaatagccatcaattgatgatcattgtgctttttagctcctgtcatatttttacgatatggtgtccaaagttcataacccatttgttttagctgttgatgcagttctttgcctaaatagccttcgtcgccaagaagatagtaattagatggatgtgcattttccatcagttcaactgtctccttggcatcatgaactgatgcttttgttacgacataatcaagaatgtaaccgtcatcgctaacaatgacatgaactttgaaaccatagaagtaaattttcttggtggccttataaccaatgttggcataaccgcgaaaaattttagcacgatagttgcgaattggttggcaaacaggtaccggaaagctgtcaatgatcaagaaatgtccattcaggtcaacctttttattcatttcttgccgtatctgataaatcaattgcaatagctgacgtgaacgtcgattaaaacgtgagtgtgataaacaattgaaacattcacagaatcttctttgtgattcaattcctgtcttagcttgccagataagtaaagccaaaatcagactgtccgtagttttaatttgatcaatatttcgccgatgagtaaactcagccggtgcatacaaacgataccagtgccgacaaattatcactaaatctttaaaactaacttgtaaatggtggctaaaacgcttaagcttaagacagttcaatcagatcagactcttttctattattactatttacaagtcgagtctaacaagattggacttttttattaactaaaacgatttaactagcaccacgcgtaattatctattctctcatgttgaatattggtcagaattttacataacagtttttgcaaataccgtttttctgattaagccagaagttcaatatcaaatatgcaataaaatcttaagccagctatatttacaagatttttctagctgggatatttttattgattctattggttcaatattaaattcactaactagtttgattattagcaatcctagcctagcccaaaagctgttagaaaaaatcaataaattaccaattcctattcaatgcagctatatgaaaattagaagaaactttttagataaattacttcattatcgattaaataaagataacgaaaatgaaatcttaaacattatttcttcacttaagactcttggcctacctcagattgctcacaacttttctacactttttactcgtattaaagacttgtaatcatctccttcttatttttatgtttttataatactctcatatctatttcagcttcaatacttttgcagatttgcaaaacgaatttaaactccatacaaaaacgccttgcccgaaagcaaagcgttttttagcataagcaatttttgattaacccttatctgcacctgcagtaattccgttaacgtagaatttctgcatgaagacaaacaagatagtaattgggatagcgatgattacacacccggcaacaaattgtgcgaagtatgcagtcgcgttacctttagctgtgtgcaccatgttatacaaaccataagcaactgtataagtcttagcatttcctgaagttgaaagaataatacctgagaaaatgaagtctgtccatggagcgatgaaggcagtcaaagcagtataaacaatcattggctttgaaagtggcaaaccaatatgtaagaatacttgccacttagtagcaccgtcaatttcagcagcttcgtcgattgaccgaggaatagtatcaaagaatcctttagcaacgtagaagcccaaaccggcaccaccaacataaactagtaacaatccgaagaggtttaacatgttaagacccttcaagatgtagtacaaagcaatcattgacatgaagcctgggaacatccccaataccaatgcgatctgtaagaatggctttctaaatgcaaagcgaagtcgtgataaaacgtaagcaactgaaatagtcaaaaacgttgaaattaccattgaaagcaatgaaataactaaagtattaatgatccagttaccaaatggatattgtggattagtaaaaatcccaatatagttctgcaatgtgaatttttccggccagaaggtcgaaacgaatccagtatcattgaatgaaaaacttgctaagacgatccagacaatcggtaaaatccaaagaatcgctaaaacaattaataagatataccgaaagattaatgagagccgtctttgatttgaatatgacttcatgtctagccctccttaaatgcattagtacgacgatatgcaatcaacgaaacggttgcactaataataaagatcaagatacccaatacggcactggcgttataacgctgttcctgaccgaaggtcaagttatataaccacgttaccaacaagtcggtcgatccggcgccgttatacttactgttcatcggtgcaccacccgtcagtaagaagataacgttgaagttgttgatgttaccaataaattgttggataagtgaaggtgccattacaaatagaatttgtgggaaagtgattgaacggaaaatttgtgcggcattggcaccgtcaatcttagcagcttcaatttgatcttgtggcaagttttgaataatcgctgttgaaaccaacatagaaactggaataccgatccacatgttaacaagaataacggtaattcttgcaactaaaggtgaagcttggttatcaataaagtgaattggtgaactaatccaatgcaagttcatcaagatattgttcaaagcaccttggtagtccaagaactgcgccatcatcaaaagtgaaacgaattgtggtacagcccaaatgataacaaagattgttctccagaatcccttgtgcttgattccttttgattcaatcagaagagcgagcaaaacaccaaagaagaaagtcgtagcagtagctgccacagcccagatcaaagtccagcctaagactgggaagaaagtaccagctaagtcaccactcaaaacatttccaaatgcttggaaacctgtccacgagaaagcgattgggtgttgacgatcatagttggtaaaggccattgaaatcatgaagatcgttggcaaaatcgtaaagaacaagatacccaataatggaataaccatcaaggttgcgtgtaaccgagtatcaagcaaactcttaagttcttcaacgttagttggaatatggtccccatcacgcttcaaaatataattatgtctagttgagcgtaagttgacaatgtataggtaaatgattgctacacataagatcaaggccaatacaccgaataacaaaatcaaaactgagtttgatggttgcttggttacataaacgccttgtgcggcatcataaacaacttttttggttttaatagtacctaatgtagctaatgaatttaaagtagggataccactgaggataaaccaaacaataaagataatttctgaaagtaagagtgaaataccttttacccattgtttgtttgccaaggcgttactacccattaagaagaatgataacttggtagcaatgtcaccttttgaccaaacctcgcgatatgttgctttaggagctacatgctttttctttagaaacataacttctccccttcttaggcaaaaaggctggacaatttttatttagcccaacccttgcttatgcttttagcaaattatttcttttcaatgttcttagcgagcttagcaagttgtggcttgtattgtgctggcttaatcttgccgtcgtaagtaccactgataagtggagctgcaccattccagaatgcggccatttgtggaagcttaggttgcaatactgagttacctggcttagccatttcgattacagcttcagcaaccgggtcactcttaacagcacttgagttgacagcgctcttcaatactggaatttgaccagcgttcttatgagcaattaattgtgacttcttgttagtaatgtaagcagctaaatctgaagcagccttagcattcttggtgttagcattaactgcgaagccttcaataccaaggaatgcttccatttgtacgctcttaccaccaacttcaatcttaggatacttagcaactgcgaagttcttacccaagatcttcttgatattagcagcgttccaaggaccgtccaaaatagcttgtgcgttacccttcttcaattggttcaaagcgtttgaagtttgcattacacccttgttcttcttttgagctgcgtaccacttcaaagcattaacaccgttttgtgagttgaaagttgagcccttaaggtcttcaccattcttaccgtaaagtgtagtacctgctgagaacattactggccacattacgtaagcgttagtaaagtcggtagctacaacaccctttgaagttaaagtcttccagtccttaacgtcgttagctgataacttagacttgttgtagtaaatggtttgagcttgttgtgcgtatgggaatgcgtaaaccttgcccttccaagttacaccctttgaagcaacatcgacatagttgtcttggatatccttagttgctgatggtgaaagtgggttaatgtaaccagcttcagccatttgacctaattgatcgttaggaacttcaaagacatcagcagcctttgatgggtccttaccaacgtctgtcttagcgttagctgaaccgttaggactttgaactacacgaaccttaatattcttgttcttcttagtaaagtccttagcaatttgcttgtagtaaggaacttgttcagtatccacccaaagagtcaagttagccttcttgtttgaattactgctacttgatgatgaattacttgagccgtttgaacatgctgctaatgataatgcagcaagaacagcagtactacctaaagccattttcttccaaatcttcatgactttttcctcctaaaaaatcaaaacaataaacaattcttaacaacagtagcttctgctacatatggttgtaagcttaattaatcaaatttgtactgcgttttcagtacaagagttagttcacaattgccttggtagaatccttgtcaaagaagtgagctttgttaacatcaaagcccatcttgaccttgtcacctggcttgtgataatcacgtgaatttacaatagcagtaaattcagtaccatcaacttcttggtgaatctgaatagttgcacccaaaagttctgaaacaacaacatttgattcaattactgaatctggccaggtttccataaatgcttcttctgagtgaatgtcttctggacgaataccaaagactaagtctttgtcgttgtagcctttttcttccagcagttttgccttaccttcaggaataccaatattcaagcctttgccatcagaaattcgaccgtccttgtagtgaacattgaagaaattcatttgtggggaaccaataaatccggcaacgaacatattaactggcttgttgtaaacttcaagtggtgagccgatttgttcaactctaccaacagacattacaacaactctatcagccaaagtcatcgcttcagtctgatcgtgggtaacataaatagttgtagtacccaagtcttggtgaagtttagcaatttcagtacgcattaccacacgcaatttagcatccaagtttgataaaggttcatccatcaagaagataggtgccgcacgaacgattgcccgtcctaatgcaacacgctgtctttgaccaccggacaaagcacctggcttcttatccaagtactcttcaaggcctaacatcttagctgcttttttaaccttttgatcaatttcatctttaggcgtgtgacgcaactttaaaccgaaggccatgttgtcataaatggtcatgtgtggatacaaagcgtagttctggaaaaccatcgcaatgtgtctatcctttggagcaacatcattcattactttatgatcgatttccaaagtacccttactgatgtcttccaaaccagcaaccattctcaatgtagttgacttaccacagccagatggaccaacgaaaacgatgaattccttatccttgatatgtaagtcaaagtcgttaacagaatatctgtcgttacctgcatattttttgtaaatatggtttaaatcaacctcaaccattgtttcccctactctctttaattatttttcattaaaaactttttcaatttcactcaatttcaactcagcagttgttggaacgatgtaatcagcttctttcaaaagctccttatcaccaattcctacggcaaattgacctgcagccttgattgcttcgaccccagctttggcatcttcaaaactgattacttcatcagcctttaaccctgcaatttcttgcgctttgatgtaaatttcaggatctggcttaccatgatgaagtgttgctggatcaacaatgccatcaaattcatccataatacctaatctagttaaaatcttaggagcattcttagaagcagaagcaattaccatctttaagttttgcttcttagcatctgccaataactcagggatcccaggcaaaatgtcctttggcgtcattgtttctacttgttcaacaaatttagcgttcttttcagctgcgaacttttctttttctgcttcagtgtatttgtcttcttgaccaccgtacttcaagatcaggttaagtgaatccattcttgaaataccacgcaagctatcaagttgagcatctgttaaggtaatgcctaattccttagctaaattgttccaagctgtaaggtgaaacttagctgagttagttaaaacaccatctaaatcgaataacaatcctttaagcatttgtagtttcaccttctttaagagtaactttcttatcgtgaactaatacatcaatatcttcacccttaagcaaagtaagcttagttccttcatgatcaacataaacttcgatcaagcgaccacggtagttgatcttgaagctgtagtgatcccaaccttcaggaacaaatggattaaacttcaattggttgtgatcgtaacgcatgcctgcgaaaccttgaacaattgtaagccatgaaccactcattgaagtgatgtgcaaaccatcaacggtgtcgttgttgtagttatcaaggtcaagacgagcagttctttggtaaagctcaacagccttcttttgcttgccaagttcagcagctaagattgagtgaatacatggtgaaagtgaactttcgtgaactgttaatggttcgtagaagtcgaagttcttttccttttgttccatagtgtattcatcgttcaagaagtagataccttgtaaaacatcggcttgcttgatgaatggtgatctcaagatcttgtcccatgaccagtgttggttaattggacgttgatctttgatttcgctaactggacgaatatccttgtctaggaagtcatcttgttgtaagaagatgcctcgttccttgtcttctggtaagtacatgttatctacgatgtcttgccatttagccttttcttcgtcagttacgcgaactctttcttgagcttccttagtagcaagtggcaaacgttccaaagtgtatttgagaagccatcttgccatggtgttggtgaaccagttgttgtttacgttgttttcgtattcattaggacccgttacaccgtgcattacgtacttgttacgccactttgaccagtgaactctagctgcccagaatcttgcggtaccaactaaaacgtccataccttcgttcttaacgtagctgtcgtcgccagtgtaatcagtgtacatagcgattgcgtgaggaatgtccgcatttctgtgaatttcttcaaaggtgatttcccattcattgtgacattcaatcccgttgaaggtaaccattgggaacaatgcacctggtaagccttgttctttagcgttatggtatgcgcctggcaattgatcgtgacggtattgtaaaagtgcccgagtaacactaggatcagtaacacataagtacattggaacaatgtaggcttcagtatcccagtaagtagcaccaccgtatttttcaccggtaaaacctttaggaccaacgttaagacgttcatcttcaccgtaataagtcatgaataattgacaaatgttaaagcggataccttgttgagcggcatcatcaccagcaattacaacatctgatttgtcccagcgcttttgccaaacggcttcatgatcagctaagttttcttcaaaactcttagcttgaagcttggtcatcaattcagctgccttagcatcttgatcatctggtttgacgtcacgactagtaacaacaatgacatctttttcaagatcgtagctttcgccttcatttaactcaactgaaagcttttcatgaagttgggctgcttcagttgaaacatcacccttaactacttcaccattatgacgaagactttgcttaaggaggactgtaaattgtggaaccttgtatgggttagccttagtttcaaccttaatagttcttgcttcagcattttcacctaaaggcatccagaattttgcatcgtagttactgtcttcgttaacaacagttccatcaagtgctgcatcaaagtcgatcttagctttaccacttaaaacggtagccttaactttaattaaagctgcttcttttaaggtaatatgtaaaaacctttcgaattcgaatttaaccttagtatccttaccttcataagtaaaacttctagtcagaagaccttggtgcatatcaagtgctaagtagaaatcactaaacttaactttagctaagtcaagtttttcaccattaatcgtaattcccatgttgatgaaacttggtgagttaggaaccttaccaaagtactttggatatccgttcttccaccaaccaacacgcgtcttatcagggaaccaaacaccagcaaggtaagtaccttgtaagctgtcacctgaatagccttcttcaaagtttcctctcatacccatgtaatcgttgccgattgcagtcatactttcttgcaatcttttatcttttggttcgaacttatgggtaacgaccttccaaggatcaatttcaaaaattcgtttcatatattctatctcccgtaatattcgaggttctctcttgtttacgctttcattatcctttagttgaaagcggtttacaatattaaatctgctgttaccgttatcaggattagttaatagaaaaagaaggtagatcttaatctgccttctttttttgcttattaaaagtaacttttaatgaacactcactacaaagccttttggtgccaattgattattctcataatcttgactaaacgtgttctcacaattgatctctactggatgatcggtcgtgttaaagtatgctttaatgctttcattcccctcacgatcgacctcaattaacccattctctgttacgtgtaacttaattcgacctttaccgaaagtttcatcatgttgcaaacgaaagtcaatcaattgatgaactcgttgccaaaccggaccgtcttcttttgcccaatccattggtttacgacaatcaggatcgttgccaccagtcatacccatttcagttccataataaatgcatggactacccttttgcataaattcaaaagctaaggcttgcaaagccaaatcttggtctccattagctactgtcaaaattcgggctgtatcgtgtgaatcaagcatgttcatcatggctgcattggtagcatcgcgatatttcatcaactggtctgtcaaacgactagttaattcttgtgctgacagcttatgcttgaaaaagtgatcttcaatctgcaatgtatatggataattcattacgccagtaaactcatcaccgttaagccatggacgagctgagtgccaaacttcacctacaatataaaagtctgacttgatatcagtaacagccttgtggaatttcttccagaagtggtgatcaacttcgttagccacatctagccgccaagcatcaatatcaaagtattttacccagtaagtagcaatctctaacaagaaatcctgtacttctggattagctgtattcaactttggcatatgcttttcaaaggcaaaagtatcgaacttaggactaccctcaccctttaatggatcgcggtaaggttcaactggatattcattaatgtggaaccaactagcaaaacgagaacttggaccatttttaacaacatcttgccattgcattgattgatcacccaggtggttgaaaaccgcgtccagcatgaccttcattccgcgggcatgagcttcattaacaactttcgcaaataaatccttgtcgccgaatgccggatcaacttgcaaatagtcaatcgtatcatatttatggttagaactggctttaaaaataggacagaaataaaggccattaacacccagtttcttcaagtaatctagatggtcaagcacgccttgcaggtcaccaccatagaagtcttcgcggccaggatgatcctccggattccacgctttaaccccttggggatcattagacttatcaccgtttgcaaaacgttctggaaagatttggtaccaaacagtatgcttaacccattctggcgttttcaccatatcaatttcatggcaatatggcactttgaaataagaaccatcttccataatggccttgtctacatcactgctaattgcacgatcaccgacaactacactagtgccatcactgccaattacttcaaaggtatacttcaagcgatgatatggtgcttcaagcgtaatgccccaatgatcttcacactgccctacgccaattttttccatctcacatgttttagcctgttcaagtggcaaataattatcgcagtaatgaacaattacttttttaacgtcatttttagcactgtgaaaacgcacgcgaacatgacttggatcaactacaaaactatcttcactttcagttcggtgtcttaaagctgctaattgcatatattaattctcctttttcaacacaacacctgcataaggcatcaaagttaatttttcattagttaattgatattctcccgcttttagtgttgcaacagtataaccggctggtatttcaacagttgtcttttgatcactcaatgaaacagctacaatggcactttcatcatgtaaatcacgttgataaacatagctattcttatccgttgaaatcatataatacgttccaatctggaataaggcttcttttttgagttccagcagttctttgtaaaaattaaacatgctggtggtatcgttaatctcattagctacgcaagcatcatcctgtttaatacctgttatccatggtttaacttcactaaaaccatggttctcagttgcatcccacggcattggaccacgggccggcaatttatgtgtttcactaaccatagctaaggccgcatctttgctcaaaactttttctgcatcctttaaccatggcgctacagtttgatcttcgaattgatctgcactagtgaaatgtagattctttaaccctaattcttcaccgtaataaattactggaattccgcgttgcaaatacatcaacatcgccaagctcttagcctgagtctgtgttctagctacgcgtgtagccaaacgggccatatcatgattattccaataaagagtaggctgcgatacgcctgctaatgtttgttgccaaaccacttgattttgtttaaaggccgtcaagtctaactttttaggctgatattgctttgaaaaacgctgatcacaattagaatcatcatcggtaaagtaccggaaggtaattacactatccattaggtgattacgcttagtcgtgtaatcaacagctagattgacactagcacttgcagcttcacctaataaaagcgtatctggataatcctgcttaatctgctcacagaaaggccgcatccattcctgcacctgtggtaagttagcgaaaaatggttccgcaacaattggcttgttcacgtccccatctccagttggataattttgtcgcaaatctgccttgccaatatggataaaagcgtctaaacgcaaaccatcaattccttttttcagccaatactctgccacttccaacatagcatgccgaacttcgggatttttccaattcaaatcaggcatccgtttatcaaacaagtgaaagtaagattgacctgtgcctgctggatctggctcccatacactgccaccaaagaatgaaccccagttattaggtcgcttgccatcatgaccagcgaaaatatagtagtctcgataaaggctatcggggttcttgatggcatcttggaaccaaggatgttgatcagatgtatgattcaagacaaagtccatgatgaggtggatccctgccttatgcaaatccttgattaagttttccatatcttccatggtccccatatgaggatcgattgcgaagtagtttgaaacatcatagccgttgtctacttgtggtgaaacaaacacaggattaagccagacggcgttaactcctaaatttttcaaataagggatgcgtttgcgaataccattaaggtcaccaacgccatcgccattgctatcttgaaaagacttaggataaatttgatatataattgcgtgatcgtaccaatgtgccataattaatttcctccacgcatagtttaagggaaattagaaaccgttttcaacatcatatttattgttagcggtatcaaaaaagcacaactcaaatttgaattgtgctctttgcttacttctttttaaatatcatgttccaaacattccgccacttgctgcctttctcctgcaaatcagccactggctgcgttaccttaatacagccaagatattttccttgatcattatgcaaactataaaaggcaatgttcaccggaatcccatctttatgaatcataatcgacaatttaccacgtttgccttcgtgcatctgctttaaaactgccttaacatgaccttgactgtgaccgggatgaacttcaaagacagttttgccgatatctttttcagttcgcttaaataagcgatgtttattcatcgatgaccaaacaaccacatcgttttcatctaggacatccatttcctgaggaatagtctcaaagatagcatttaactgttcgacacttaaactgccgcctattaattcgattttatctgtcatttactttgctaaccttataacttcacgggcaatcatcaattcttcgttggttggtacaatcaatgcttttacttttgaatcaggcttagaaataaatttttcaccgtctgttcgattagccttatagtctggctctaagccaaggtagtggagtgccgacattacaccggcacgaacacctggatcatgttcaccaatacctgctgtaaatacaatgccatcaataccatccatctctgctgcatatgcaccaacataacgtacgacacgatttacgaaaatctttcttgctaatctagcatgctttttcttacttgccaacagatcacgcatatcagaggaaacacctgatacgccaagcatccctgacttatgatttaacatgtctactgcttcttctactgtcatactggtcttttgcataatatactcaagagcagatgggtcaaaatcaccactacgtgttcccattgctaccccagttaatggactaaagcccattgaagtatcaagtgatttgccgtttttaaccgctgtaactgatgcaccagaacctaaatggcaaacaatcaacttaagcgtatataagtttcttcccattagtcgagcagtacgtggagctacgtagcttactgaaataccatgtgcaccatattttctgatcccatatttctcataatacttataaggaattggataaagataattaacctgatcaagactagtatgatatgaagtatcaaacactgctacttgtggcacatccgggataatcttcataaatgccttaattcccatggcttctggcacattatgcaatggtgctaattcacccaagtcaaaaatttgttgaagctttttttcatcaattaaggcagactccctaaaaactttgcccccattaactactctatgacctacgcctgctagttcatccagactttttaatacgtgaaacttctttaaattttcaattaataagctaacagctgcttcctggtctggaatcgaagtatttttaatatattctttgccattcaacttaattttgaaaacagcattgtccattcctacacgatcagccatccctgaagcgataaccttttcgtctgggaataaaaaaagcttatatttaaatgatgaactaccagaatttattgccaaaacttttttcataatcgtgacctctattcatattttatctcttatttttagtatagcgctttcacctataatagaaaataattttaaaagcagttaaaaagcacctctgagttatcagacgtgctcgttattttttcgatttatctagttgattggcgccgaattagcttaggtttgagcattacttcaccttgaggtgaacccgattgggcaatcttttgcagtagcattttagctaacatttcacccatttcaaaaattggttgtttaattgttgttagctttggattagaaacttgatctaaaaagacaccatcaaaaccaataactccaaagtctttcggaattcgagcgccttcatcttgcaattgccgtacaacacccactgcaattcgatcactggcacagacgaaacaagtatcttttttaaattccttaaaatgttcatgaatcacatcttgcgcagcatgactatgattagaaacccgaaaaatttgtggtatcaactggtgttgttgcaaagtgttgatataaccagcttcacgtgaatattcaaatggctcttttaaatcaattccaataaagacaatgtgcttatataaccggtctaaagcatattgagtagccatcttctctgctaactgattatcagaatcaacaaagtcatagccgcggtgattttcaccaaataaaacaaaaggcttatcgagtttatcaaataattcataatctttgtttcgcgccccggtaattaaatagccatctgcatgttccttttcaatttgattaggatccgtaactaattgcatcgcatactgcttagtatttaaaccacgagcaaaaccaaaaagcaagttcatatagtatggctcagtggtatcaatatcttctaaagtgacgaattttaccacgttagtccgattattaactaaagcctgtgcaattgaattgggatggtagtttagtttctccattgctttttctaccattgctcttaattctggcgttacttgctcaggatgattaatcactcttgataccgtcatttttgatacatttgcttctttagcaacatctgataaagtagtcatattattcctattctaagtacatctttctgaatcggtttaaatctttttggctaaagccaagctcttttttgaaaaatccatcaaaactgccccagccttggcgaatagtttccgtaattccacgaatagccggtccctctcccttggtaatattcattttagaaactaggctagcaatttcattatcatcggggaactgtttagccaaagcaaagtcatacaattcattggtcaataaataatcacgcgaaatggtgtcatcatcaacacctaatgcagttaagatcagtgctgaagtcattccagttctatctttgcctgcactacaatgataaactagcgcatcttcttcaggtaattcaatcaattccgcaaaaattttagcaaattcatgttgactatgtgaattaagcaaaacctgctggtaaatttgaccaagccaattgtcacccatatcaggaatatgatggacaaagcgatataacttgttatcgcctttattttgcttgcggttttcagaataaatatgtgcatcaacaaaacggacatttgaccaaagcttgtcaggcgctgaattttgttcatacttagagcgtaaatcaacatctacggtaattcggcgttcaactaacttttcttgatcttccttcgacaaggagctaagtgaatcagaacgatatattttgttccactttacatgttgacccttgtcattttggtagccgccgatgtctctgaaattcagcggtcgatccaaagctaatattcgatcatgcttcatttttccttgcctttcctcattaaagtgttaataccgtacttttattatatcattatcagtcatgtgcaaataaccgagcagcacgaattgcacgttgccaacctgaataaagtttttcacgttcaactgcactcattttcggctcaaaggcctgtccaatcgtaaaggtatgctttaactcgtcaatatttttccaatagccaacggcaaggccagctaaaaaggctgcacccatgctggttgtttccagcgttttagcgcgttcaatttcaatccctaaaatgtcagcctgaaactgcatcaggtaattgttgttgctagcaccgccatcaacacgtaaagcaggaatttcaatgcctgaatcttgttgcatcgtatcaacaacgtcacgggtttgataagctaatgactgcaaagttgctttaattatatccttgtcagtagttccacgtgtaacaccgaagattgaaccacgagtctccgcatcccaatatggtgcgcctaacccagtgaaggcagggacaacgtaaacctcgttctctgatgtcgactcaagcgctgcttgttcagagtctggcgcatgcttaatcaacttcatcgaatcgcgtagccattgaattgcactaccagccacaaagattgatccttctaaagcataagtaatcttaccattaatgccataaccaatggtcgttaacagattattgttagagtctgttggcttgtcccctgtgttcatcacaataaaggcaccggtgccatatgtatttttcaccattcctggtttcaaagctagttgaccaaataaggctgcctgttggtcaccggccatcccagcaattggcacttgtccaccaaagaacatatatgacgctgtttcaccataaatctctgaattcgagcgcacctcaggcaacattttcttaggaatattgagcaaatgcaaaatatcgtcatcccacttgagcgtgtgaatattaaacagcatggtccgtgaagcattagtgtaatcagtcacgtgtttagcaccatcagttaacttccaaactagccaactatcaatcgtgccaaaaagcaactttccctgttcagctttttcttgcgcgccaggtacatgatcaagaatccagcgaatcttagttgcactgaagtatgggtcaataattaagcctgttttttgacgaatttcatcactgtagccttctttttttaatttttcagctaattctgttgtctgccgtgactgccaaacgattgcatgataaattggctcacctgtatccttgtcccaaacaacggtcgtttcacgttggttggtaatgccaattgcggcaatttgattaggccaaatgcccgaattaataaaagcattggcaattgttgtttggaccgccatccagattttattagcgtcatgttcaacccagccaggctctgggaaatattggtgaaattctttttgggcagaagcaacttcacgtccatcatggtcaaaaataattgctctagtagaggtggttccttcatcgattgctaaaatatatttttctgtcatagttattctcttttctgcaaaagcgctttcttataatattactgtttttctaatgcagattctagcagttaatgtaatagatacggtataatttttataaggattttttaaggagggcattttaatggaaaaaaatcaaaaaattgcggtaacaattgcgggtaacgatagtgatggtagtgcaggaatgccagcagatttgcattcattctatgcacggggcgtttatggcatggggctgatgaccgcggctgtagctggtaatacaaaaggaatttttgcccaacaaattatgccgcttgattttatccaaaagcaattcgatgtgttaaacgacgacttcaagattaatgcgactaagacagggatgctggctaacaaggaaattatcgattgcgttgccgataatcttgaaaaatacgacatgggtaaaatcgtgcttgatcccgtcatcatcactaagcacggtgccaccctacttgatgatgatgcctaccagaccttcttagacagattattgccgctagccgatgtaattacgcctaacttttatgaacaacaaaagctaactggcttgaagctaaataataaggaagaaattcacgcaggcgctaaaaaactacaagagatgggtgctaaaaatgtcttgatgaagggacgtcatgactcagataatcagactgaagtaactgatattttgttgactgaagatggcgcatttcacgaatttaccaagcctttctttaagactgatcgcgtgaatggcacaggtgatactctctccgcagttattgcggcagaattagctaagggaaagtctgtaattgatgctataaaaattggtaaggactttacttacgctgcaatttctcacccaattgatgttggttcaaaatggggtccgatcaatcacttggctgcacaggaagaaaatagatagaaaaaacaccgaagctcagattttgagcttcggtgtttttatgtctgttttcaattaaatcattgctgtgtagagatacagtattacacaaataatgaacgctattacgtatcccatgattatgctaataactcaatgaatatgatgatgttgcatccaagtagctaaccagtcgcccaggactagacaatatgatcctactaaccagtaattgatctttttctgattaattgctggtaatggcaagattaagattattattagcgctacagctaaaatatatttcaaggctgtatagagtttaggacttagtaatgattcacgcaatttattttaccttgtttcttctaaatcatatattcgatttccattaatttttggatttacttatttcttatagctcttaatgatccaaaatataccaagcataataaaaaggatcgataatactactagttgcataactggtttatatctaagaacgcatgaatctattagaaataccacaccaacagcaataattgtcattccagatattttgctttccttttttataataattattacaacagcaattaagattactactgcagttacaattgaagcaacgtcgacttgcattaacttaagtttttccttccatctaagtcttcaactattattttaaatcatgtaagttctcctgcgattgactttgtatcatatttgttacaaattattactcagaccaactagcaataaagtttttatagcctaatacaccaagatcctgtctaatctcttttgttttgtccttttgatccaaaaataatgctttcatataaaacacttcaattctataaatcatcaaatgaaacgacccagtagcattaataatatattccatcacatcatcaatatgatcaaaatgtgtcagttgtttatgaacctttctgtcgtaacaaaccaccagataattttctagcaatcttaaatatctttcagtcgttaactctgaaagctcagatttgtttgcaaaatcaagcaagcgcccaattaaaaagtccaattcatcttgtggccacatcggcatcgtattaaccagtaatctcaacaggtctggtcgctcaagccaattatttccttcatcaaactcagcttttattttcttcctgatttctacatcaatcttgtcagtcttccccttaaaatatgtcaaagtaattagtgctcgcaactttagaatctcattattagatgaattcattatctgctgacaatacttatccaaagcttcagtatctttcgcactaactgcttgattcattttagtttcaaattgcttctcaacttttcgttcttctaacgtgtagtcatcttgaataagatcacaaaattctactaaatcaatttgatgctcaagcaatatttgaaataagctttctgcatttatgcgatttttatcgctttcaacttttgcataaaacggtcgactaagaatcccttcgcacatctgctcttgtgttaaccccaacttcaatctttttttacgcagtgcttctccaattttcatagcaagcctcctgtacaatttttaataaaaatagcactttatactttttagtcaatgaaaaaagccgccccgagggacggctttgtagtggcgtagcatgctacgaatcaacgtaggagttggtcaagcatatgctttaatcgcttcttaagagctttcttaaagcgcttgatgcttccgcggtcaattggtataactactagtacgagaaagatacaccacttcacggagaatacacctccttctgcacgtaaagtaaaggcgctaccctttgtgacgtgcattttaattttatcatgatataatacagttagtacgagaaagtatgcacgtgatgtgcgtgggctactagctggtagctcaaaaattagcagggcggtcgaatgaccgtcttttttgtgcaaaaaaacagcaacgaaattaatcattgctgctaatttacttacttctttttctcaatcacaaaataatatcctgctgtcaaaatttgagcaattccttcaagcgtaattgccaaatctgcaccaaaacgcgctacaatcagcccgcctaaaaacgagccaattggaagcattgatgacagaatagagtcattaattgtttctacttgacctaaacatacctatcttttttagtatatggttctatctataaatataactaccatcgggataaaacgttattgctcgcttatccttgtaggactcaattaatgcattgattgaatttttatctttgaatcccattctttttgctaaataattttgcgtcctgcctgtatccttacaaagggaatttaatgttctctttagatacttaaaatcatacttcttatttaaagaatacattaaatctaaaagagatattattacaattgctaatctgtgaggataattaccattatccatattcaaatatttgcgatattttgtagcgactttaggcatggtcttcaacgaaatatctaccaaatctccattatgacaacatatatttctaattaaatttagcaattctaaactttgaattagacttttaatatctaaatggaataatttctgactaatttctttacggttatcaggtagcatcaacttggctaaatatatactttgcccgaatgataaagtatttaccataagccaaactgtgggaaatattcttgtacggtccgttcgttcaaatttttgaacatctatatagttagactttttcacttgatgctgcaattgtgataaaaaagccagttcttcattttttatcttatacttatctatttttacgcccataattcttccacgacgtttaacagtacctaaatatttatttcttccactattttgacaccacttttcaaagtccaaatataaatatgggtctgtcttacctaaaatataagagatttcattgttcaatgcagtttctatatcaccaattgcttgaaaaatttcttgctttaaacgttgatctctatagtatcttttaaccaattcatcaaagctaatacccatatactgattattatcatgatcccaaaatgcataagaatactgtttcaatttataatatcctattatttttaacgtattaacctgcttttcgaatttaatgctattttgatcaattccagtgattccttttttcttaaaaagaaggacttggtctacatatgaaagatgatgctccatgattttctccataaaaaaaccttcgctgatggataaatccgtcatcacgaaggtatgatctatcattattatacaagatttcccaaaaaaatgtagtatttagctagtatttttatcgaacgtatgattaattatatagttatttacatttcaaagcaaacagtagataaagtaagtaagtgtcaatgtttttgcggtagcctttaaaccattagtctaaccttaatttcttaaatatttatatgacttaaatttctgcttagcttgcttaaataactattgccagctacctgtgcggttaatgcgccatgctggatgcctaaatgaacttcatgacgcttctttaagctgtcacgggccgctgcttttaattcctgttcagtcaatacagttatttctgaatcttcaaactcgctgctaagccaaaattccagctctcgattcttgatgcagcttaagatcctaagcatgccttctgctccagattttgaccatttcttgccttgccccttaacacggtaggtatacttgcggtggttgctctcgcagcagccaatggctttagtcacagtcagttttcgtttcttaaacggcttaatatcgtcccaatgacgatcaatataattccttaggcgccccagataatcatgattgagctcggtattcaattcatcaattagtcggctttctgcagtggttaggatagttttaactttgtcatagctgtatttgtattccaaagcagaaatcagcttgccttgcaggtcaggcgcaaaatatagcctttctttgattttcttatttaggtgaaagacatccaagaaatgctcatgacgcttgcatagccctacaatgtcatcgaagtctgttttggcatatccagcaccgccatcggcgttgctaagaattacagtatcagaaagatcataagtattggccaggtactccttggcttcgttcagcgcatcaagtcggcttaaagaaacaaattccttggcattgattcgctttctgcgtttcttgcttatattgacaatgccttcacagacctgatagcgatgaaattccaaccggcttttagtgcctttgatcaccacgccatcgccttcaagatacaaaactgggacctttttcttagtgcctgcggcatcatatcttgaatctgcttcttggcccgctttaatatttttcccggccatttttaccaaattgcccacctgcatatggctaatattaaagccagacaggcaattgactgctagagcagtattgcgataagtggcaacgctgcttacttctaagatgtttttgactgctaaaatactgtagcgcttgtatttgtcaaagcccattaattcatccaagggataccttgcttgtttgcctgggcagacatatcttcttctgacatacctaacttcgccaaaagccatattgattgagcgctcattcttcttatcaatctgatagccctgtgctttaaccttggtaatcatttcatcatcaactttagctaaagccaaggccatgatttccttaatcaggtttaagaagaaacagattatttttctttcacgcttaatataattatcttcagactttataatatttgcgatttcagttacaattgaattcataaaagaccagcttctaatgtgttttttgttcttaacatcagactactggtctttttgtttgagctcaagtccaaattcaaaggacttgggcttttttaattatttattcaacttaccgtaaaaaattatacacttagataaagtaagaaaaaaacagttacatgccataatgtaaacttagagatttttagcaatctacatctatgcataatttttgcatgaaaacagcaatgatgagtgtattttaatttacttctttttcccaattacaaaataatatcctgctgtcaaaatctgcgcaattccttcaagtgcaatcgcccaatccgcaccaaaatgcgctacaatcagtccacctaaaaatgaaccaatcggaatcattgacgataaaatcgactcattaatcgtttctactctacctaaaatatgcggactaaaactctcctgcaccaacacttcaaagttaatattcatcatcacaatccatagttcagacgtaaaaaacaaaatcaacagtagaaacggcatccctttgggaacagctggctcaagaacaattgctaaacctgataacgtgagacaaatgacgactagccttttaatcttgcttttatcaaaagttagtcgctgtaccagtacactgccaactaacccacctattgaagaagctaattctaaaccgccatagctaatcgctgatttagtcaaatgctcagtcgcaaaatatggcaagcccacagaggaaataccataaaatagattagtcactgcaaaaggcatgatcaagcgtgctattttgccttcttgtttcagagtttgccagcctttaagcaaatcttgccaatagttttctgtgaaatattcattcgacttattcgaaagtaataatttcctagacaatattagtcgcgtataaaaagctagggcgcttgcaaaaaatactgcagaaataattatcgtggaatcaagtgacacccaagtaatcaataacgttgccgctgcattcaaaaacaaatccagcgttttataagtcatttggaaaacgccgtttactttagttagctttgcttttgaaataatgactggcaaaattttttcttcagcaggataaatcaaagttgagccaatcgttgaaatgacgtatatccctagcaaaagccaaattgttaaatcttgccacagtttaatttgaaacaacaacgccgctataacgctgtccactatctgcactagcgttacaagcttaagtagctttttaatatagacacgatcaatcaacggtccgaagacgaacgacaacatttcaattgatgagtctgcaacaaagattaacgataagataagcggcgaatgaaagcgcaccttgaaaaaccacaagatcgccatgtaaaacaacgaatccgcaatgttggttaacactcgtcctgctaataatcgtctgacattgacattttctttttcaattaagttaaacattttcccattccttttcacaacactactaatgtcgctgaaagccagggaaaattactatttagttttagtttaaaatcccagactttcagctaaaaatctgggttgagccttaagtagcgtttgacgaatgaaaggaaataattcattcgcaaacttaaccctaaaatgtcgcgcattttagtcctcgctttctgtgaaaattaagatcattatagcatgaacagtggcttatcaataatagtcattctatccttatatttttcgtattttcattcaatttcagatcatgacttatgataataaccaaattaacttgcgctatttcctgcaatagttttaataaatcactttgtaactcaggatagatatttgccaacggttcatctagtaaaaaacattgcgcgccagtttttaaaacagcagaatataactttactaactgtatttcacctgttgatagttcgctcatctctctatctaaaatcttttcaattctaaattgtggcgaatcaaaaacttttgcaaaatactcgcttttataaacctgacttttatcagaatatgatcctaaatagtccctcactgaacaattagggagtggtatatcttgaaataaacaacttatgttcgattctctcagttttcttttattaattaaatcagcatctataccatttatggttatttttccttcctttttcggcgtgtataggccaattattgtcctaagcaaagtagattttccaattccatttctgcccctcacaatataaaatcctggagtaacaaaattggcagaaaaattttgggtaaataacggtgttttttcatctaagtaaatattaaaatcatgtacttgaatcaagtttattttagagattatttttctaccatcttgttcattcttcatggttagtatattgttgattctcatccacgctactttaaatgattcaaatttaaataaaatagaaaaaatttcatcaacctgtcccaaaagttgattaaaatattgaaaaataattgaaaaggaaccgattgtcatcttaccggaaatcactgataaaccgccattaataaacaatactaattgaaaaataagttgtaaaacaatctcgctattagacatatttaaattgagaagaaaatctctcttagcaacgcctaaaagcgttcttttagtattgctccatctctcagtttctattttctctcttcggttaccttttacttcaatatacctgcttaaccattcagtaaaaccagaaaagtacttattataagcttctttcaattttaaactaacttcaaaaatcttaggccgtaaaaataaatatatgagactatatgcaggcaacaggatcgctattaacaataaaaaaccagacccagccataaataaatatgtaaaaatcaaaattgaagaaagggcgattgaaataatttgatttattgtttggaataaaaaagtcaacacttcagtagtatcttcagtaattctatctgctgtttgaaccgaattcatctttgtaactgctagcgtatccttcacatacagttctttcattattacatcattaacttccatgtttatttctctaaatcttaaaatctgaattttgttcataaaatatgacaacaaaagtctgataagacttaaagtcgttattaatacaatactacgtacaaaagcagccctatcagccttatatactaaggaatttaacagtattccttctaagtaaacattaaaagtcaaaatgccagtactgataatattcattcctaatagaagccaatattcaattttatactttttatcaattttgctaaaaatcgtatgcatagtgtcacctaactctgactagcagtcaaaaatgttaaaatataatgaatataaaattagataaattttatattcttatttatcctatgtcaatactaaataaattgatttggttttactttcatgctgtatttgatattatgtagttactaactaccaaataactatctatcaactacagaaagagaaaaatatgactgaaaaagcagcaattaacatccgtgttaataaagaaactaagcaaaacgcagagaaagtattaaacaaactaggcatcccgatgtcagtcgcaattgatatgtacttacgacaaattgcattgactgacggcattccctttgatctatcttccaagaaaagaaaaaagaaaaatgatcacgaaacagcaatgatggtcgcagaagctacagctcaatatgaaatcgttaaatccaactgggaggataaattagctgagtttattcctgactggatgaacatgaataagatgactaaagaggagcttgaagcaaggttagctaagcatgcccaagatgcaagagatggtaaaagtgtcgagattagcaaaacttttagcgacctgaataaagaattaggaatttaaatttcatacaagaatatactgtcaaatcaagtcctaacgtatctgtagaacttaaagagatatatagctctatcttgcaattatctcgatctccaaaaactgctcgagattatgtaaaagatcttgaacaaactatgcaagcgttaaattattttccagaaagatatagaaaaactccttcaggaaaataccgacgagttaatttcaaaaaatacgctatattctactttatcgaaaacgatactgtacacattattgatgtcatactagcttcatcaagtacagtattcaaatattaatcctttgccccattctagctattaagctatactagacagaagaaattaaacgaactaagggacaataaaatgagcgataaattaattaaaattgcatacctctacgaagatttaatgaatacttacggtgactcaggcgatgttaaaatcttgagctttttgctaaagcgtgaaggctacgacactcaagtcgacaatatttcacttggcgatgacttcaatgcctttgactatgatttcgtcttcttcggcggtggtcaagactttgaacaaaccgttgtagccaaggatttaccacggcacaaagaaacacttgataaatacatcaacgatgacaaacctatgctctgcatttgtggtggttaccaactaatgggtagttactataagaccaactcaggtgtaacaattcctggcttagacattttgccacttcacactgtcttcaagagcgacaagcgaatgattggtgatacccgttacatgaccgaatggggcgaagttaaggcttttgaaaaccactctggtcaaacttacttcgacaacaaggacaagttgcatcccctcggcgacatgatcgaaggctacggcaacaacccacaagaccacgtcgaaggcctgcgctatcgcaactttattggttcatactcacatggtccactacttaaaaatactaatgtagctaatgccatcatgaaaatgattatcgcttggcaccaagaacgtgttagcgaagccgaaaaagtcacagaataaaaaagacccagtcagaatttctgactgggatttttcattatcaaattaatttaaaacacgtttagcagctgagggataaaagtaggcactgatagcctgctttctcaccccttgactaggagttgcagcgtgaacatattgtccatcaccaacataaataccaacatggtaaggagctgaggcagaaccccagaacaacaagtcgcctttcttaagatgacttaacgaaacctttttacccttagtaacttgaccataagtagttcttggtaaggtctttttagcggcttttttataaacgtattgagctaagccagagcagtcaaaggctgaaggaccggtagcaccgtaaacgtaacttttgccaacttgttctttagcaagttggactacggcgttacgtttttctgttttgctttgactagctgcttggacagtttgcgtttgaagtggaacattaatgaatgaaattcctgtaaaaaatactgacaaaactgtggcaaacttaactaaactacgtttaaaactcaatttatttctccttaacacttcttatctttcaacgttttctatattaccgaagaaatattacagccttgttttaaaatgactactataaaattaagcaatgtaacaaaatctgctatttcttgtaaattttgcttaacttgaaaaacactataattttctatatgcttaatacattaatttaggagttttttattatggataagatagatagttatgtacgccactttttaatattaatcgcgctaattttaggactctcgctcgtctcagaactgcgcgaaattattgcctatgactcatctaccattggcattatctctttaaccactgccattatctgcacttttgcttcgggcattaccttgcaatttcacaagcttaattggcttacgatcagtttaatcttaattctttctgcaatcgtaattctattctggttcaaaacctatacttttggtctcgttgtcagcatttttctgatttataacatcattgtatttttggtttgtgttactaatataatttttcaaaagaaggttgaatagttaacttctatgtcagtcgttgatctctataaaaactcagcttaaattgcctatctttatgaaaagcataaattaggaaggaataattatgactagcatcattgtgtttatcgctgttacaattatggcgatattcacaggaattatatttatacgcgtggtgctagttaaatcgttttagttaataaaaaagtccaattagactagactcaagttgtaagtaatttaaatagaaaagagtctgatctaattgaactatctcaagcttaatcgtttttctcaccatttacaagttagttttaatcggttaaatgtgatttgtcgctcgctgtataagctttatgcgcctgatggacttaaacatcgtaaaaatgttgatcagaccaagcttcctgatagttctatcttagcgatgctcatttggcaaactgaaattggaattgaatctcaacgaagattctgtaaattcttcgttggcttatctcattctcgttttaaccgtcgagctcgaatgctcttgcctctaattcgttgtatccgtcagggttggaatcaggaagtaaaggtaggtggagaattattgattatcgacagttttccgattccagtttgtcagcctgttcgcaattatcacgttaagatcttccgtggcatagccgatattggttataaagcgacgaaaaaaatctactattatggcttcaaagtccacgcaatagtgagtgatgatggctatctgcttgactacgcagttactaaggcgtcggtacatgatgcaaaagagacggtagaattgatgatcaatgctcatccaattaaccattatcttttaggagatgaaggctatttaggaaaagacttagcagccaagctaaagcgtatgggatacgtgctttggacaccatatcgtaaaaacatgaggggtgctaaaaagcataatgatcatcagttaatggcaattagaagaacaatcgaaagcgacttttctttgcttagctattacaatgctgagaataatcgagccaggagcttagtaggttttcaacaacggctagaaatagctattttagcttataatatggcatattgtctagaacgatttaactagcaccacgcgtatatttataaaattatcaatgcgcatgtaacctataaaaagcattatccttatcgtaaattagtaagggtcactttaatcagtctcccatggatattttgggtcttcccgtttactctagattggagtacctatatcactttagtaatagtcagaattccatatacaatcatctggagtttgttaactgcggtaggattgtatattgatattaagatgcaaaataaatatcgacatcacaggaacaacaatggacactaaaattttaacagcaatcatcttaattatcgtagtaattgtactagcctactcaccattttataaaaggtatcaactattttacttgaataaagtaggctattgggatatcctaatccaattcctagtaattgcaggtatcaacttattcattggattaaaatacggtctaggtgccctgtttctattgattgttcccgttccactagacattattttcttaatctcaatgatttattcttactttaaaattagaaaattgaaacgcaaataactcaacaaaacggagccaactaaagcttcgttttttgattaatcttatttttcttctgtttcggcgttagattcaaagccatcgcagccacgacaaccaacactgatccgacccaatccattggcatcattactaagttaaagaatattacagaacctatcgttgcagaaaatggctcaaaagcatctaataaacttacagttgatgggattacataccgcagcgcgtttgccataatttgaaacggaataatcgtcccaattacaataactgccgcagtatacagccaaacttcaggcttattcggaactgcatgaaattgcggatcaattatcaacaaactgattccagcaaaaatcatcccccaacctgttacaaccatactagaaacttttttaacaatgttaactggaatcaaagtataagcagcctcaccaaaagcggataaaatgccccaaaatagtgcaactggcgtaatggccaaatgattaaattgcccatgcgttgacaataaaaacactcctaaaaaagcacataacgccgctatgatatccaatctacgcataacttgcttgtgcgtgatagctaaatatcccaatacaaaaaatggcccaataaattgcaagattgtcgcaatagaagcattagccacttgaatacacataaaataaaatagctgcactggcaataatccaaatatgccataggctataataaccaaaacattgtgcttatttttcaacgtagctattggtttttgctttaaaaatcctgaggcaattaataaaactgctcctgaaataatcaacctgacttgggttaaccacattggtgttaatttaggactaatatcaaacaatcctttagcgaataatcctgacacaccccacattacagctgccattgccgctagaaatgtccacaatcttcgtgtttttgctggtaccatctagttcacctttttctttctcattcacctaataattaaaccacaaaaataaggatacctactgggcatcctcaactttattgatgagtttttttaactttctttttcttaggtgaaatattcaaggccatagctgccagcacaactaaaatcgaaccaatccagtccattggggtcatcaccaaaccaaagcaaataactgaaccaacggttgcagaaaaaggctcaaaagcatctagcaaacttgccgttgatgccttgataaagcgcagcgaattagtcattaattggaatggaatcagggttccaatcacaatcactgccaccacatctagccatacatgtggcgtattcggaatatgcggcatctgtgggtgcacaatcattaggcaaattcccgctgacagcaatccccaacctgtaacgactaaactagaaactcgcttcaacacactgattggaattaatgtattggtcgcaactccaacagctgaaagcaaaccccagaatagaacgctaggcgttaaagcaaagtgattaaaacgcccatgtgtcgccagcaatactacgccaataaaggcacagatggcagcaagcacatctattcgccgcattacttgcttatgcgttacagctaggtagcccattacaaaaaagggaccaacaaattgtaaaatcgtggcaatcgaagcattagcttgttgtactacaataaagtaaaacaattggactggtaataaaccaaaaatcccatatgcgataatcgtccacgcgtcatgcttatttttcattgtagcgattggcttttgctttaatacgccagctacaattaacaaaataatgcctgaagttaccattctaatctgtgatagccacattggtgtaatctcaggactagtattaaataaactcttagcaaatagacctgatattccccacattatgcaagctaatccagctaaaaaggcccacaggcgccgttgtttttgtgtaaccattctttttaatccccaacttttctaaaactaacatactctatcataacaaaaacgggctagcttgaactagtccgttaattttttattcatcatttttcttaattgggtttctgctaggcattagctgcatgaatgtagcaacaataattaaaaagccaccaaacatgtccattgggccaaagtccgcatgaagcagtgaaactgacaggatcgttgcaatcagtggctcgaaggctccaagcatccctaccgtacttggttcaatatactgcacactagataagtacattgtataagctaacaatgttccaccaataataatataaacaattacccaaacatcaactggtgcaagttttggcattggttgagtgaagtaaattggtaaaaaggcaatgcctgcaaccaacattgctgcgccgattactggaatcggcccatactttttgaataatttcccaggtaatactgtattaatcgcttcagaaaaagccgcaattaagccccagaaacaagcaagcggtgataaagcaagttgatcgaatctgccacctgtagccaagatgaaggttcatacaactgctaccacaattgaaatcgcatcaattcttcgtggccacatcttacttctcaatgaagaatatataattatgaaaactggcgctaaaaattaaatcaccgtcgctgtcggagcattgctgtacttgactgctacaaagtacgataattgtgagctccccattcctaagaaagtaaaaatgatcaacataatgattacttttttatcatgtagcattgccttgacttggtccaagtatttccaacaagcataaatcataagcagggcgcctgaaaaaagcaaacgcagacctacaagccaagcagtatttacattagtgctagaaaataaaaattcaaccgccgtacccgatgcaccccaaaaacaggcaccgacaacagctaaagtcaatcctttataacgctaattcacattcacacatcctttagattaatgtttttcattgtaacatgggctaaaggaaaagttcaatgcttctaaagttgatttaatctatataacgtataacctgacacgctagccaataagccgattgtaaaaagcaaccaagattctggatgaaaggcaattaaaacaagtgaaagaaagcctgctgctaaactagaattgcgttccattcgctttttgccaaaaagcagaccacacataatgccaaacatagttagcacataaaatgagtcaactaacagtaacaaattctcaataattgctagatcacttggctttacttttacactcaaatcagtaaaaatctgagcacagccaaaaaataccatcacaaatgcagctaagatcgtgataaagctaatcgtacgaaaaactgacttcaccttttgagttggcgtttcatcgataaaggtttttaagaaaaactcgtgatctttttttgctactacagctctgcccatcttcttgtcataccagttcaatagaccagaaccaattagcataatagcaatcacagcaaactggatgacaattaaacgcatgaaaattggaaaggcatagattaccgtcaataacaaaattactacatagatcagctatgcataaagaaagaaatgcagacgctgtttatttttgaaaatagtttggaatgtttttgaattaggatcttgcataagacttctccccactaaatcttattacgaaaactcaaccagaaatttgccccactgagaatcaagccaataacagaagctacttgcatgcttggctgcatgaaaagcaagatcagtgataaaacaacagttaaaacgctagacgcacgaattaatttacgatttccacctaaaataccgacctccacacaaaagagtagaacaacatataggccatcaccaatcagccaaacattttcaaagagattggcaaaattaccggtaagcggcttagccaaaatgtcagtccaaagctgacgtgcaaaagcaatacttaaaccgatatttgcccaaaagagcaagaattcaaataagtgaagaaatacgtttttagtaaatctaatactagtcagtgtttcccagaatgtatcgtgttttttaatcactatccttcgatcaagaaaggcaccaattgaatagtaaatcagaattgcaatcccttgaaatgcaatcaaatgcataaaaactttaaagtcaaacatcaatgtgaatagtaaaactactacataagctaactcaaaatataatacacagcgactaaactttcgctcgctaagccagtgcttcaattctcttttattcatatgatcactaatattgccattcatattctcaccatcttttaataattatctaattatgcaaaaattgtataatgatttcaaaattttgtctagtccttttataattgatttagtaaatatttttcgaggtaaattatgaattatcccattttaattgctattttgatcttcttgctgtgctttggccgattcatttggatcattactcacgaacgtcgttccttacgcgctggagttagcttagttatcaccttatttagtttttttttttaggtgtagtcattctggttaatatcgctgaccttgatccacattacaaagactggattttgccattatttgtgattgcgctatttgctgtgatggctggaacgattatctttgcattaactttgatcattatgtttttctacgatggcattaaaatcattatcaaagaaggaaaccgctggacaaattatctttctctgggcatggggatttccattatcttcttcctatttttatatcctcttgtgggacgaattagtcatgatagctggttaaagtatccctatatttttctatggctagtcatcatctacttagtcactatcatgatgatgtatactttaacttcttggattaatttaattaattggcacatgccgcacttagactacatcgtagtgttaggcgctggcattatgggaacaaaggtaacaccacttctggcagctagaatttcccggggaatagaaatttatcacaaaaatcctggctctaagttaatcatgtctggtggccaaggacctggtgaagacattcctgaagcagctgctatggctgaatatgctgaaaaactgggtattaataaaaacgatattattatcgaaaataaatccaaaactacccagcagaacttgcaattctcacatgcactgatgaaaccaaatagtcgcttctgtattgtaaccagctcctaccacgtgtatcgcgctctggttttagctaaacgtcaaggactcaagtgtactggttatggtgccaaaactaagtggtattttactttaaatgcttttgtgcgtgaattcattgcatatctggtaattactaagaaaatgcaattgactatcatcggttttctagcagctatcatgattgctgctgtcgcatttcatttttaatttattgcgttaagttgagaaacttagcgttttttattgatttatcttttaatttttttataattatagtcaaatctatagaaagcaaggtgtaactatgaggattcgtaaaaacaacttgtcaaactgtcattagtcaggatgacgagtcctgactttttcaaaaaagtaggttacttatgtcagaaacaaaattcaataaaactcttcttagtgtcagtcatgtggatttttcctaccctaagcgcaatttattcaccgatctaaatttttctattgctaatggtgaacgtgttgctctagttgggcctaatggaattggtaaatctacactaattgacctaattcgtaagcaaatccaaccagatgatggacagattatttgtcacggtgaaattaattatgtacctcaagtcaatgatcaaactgtaattaatgactcaaagagcgctggtgaaaagcgattagctttaattgaaaatactatttggcttcctggttctcttctcttattggacgagccaacagtttacttagatgacacaaatatccagaatttactctacttactcaagaattatgatggagcaattctagtagctagccatgatctggattttatcaaccaactatgtgagagaactattattctgcagccaaataatgcagtttattacccaggaaattacgcacagtatctcgaacaaaaacaattagataaacaagccgtacacaattttaacgaaaagcgagatatattaaagcaacaaattactgaaaaagtctctactttaaagcaaaaaagtactgactataatcattttgctaaaacacaagacaatactggtcgctatccttcacggagccatgatcatgtccaaaaaggattaaatagtcggcttaagcgagctgaacgtgaactggctgagcttccagagaaacagcatctatatcaacatcaacttaaacttcctgaatttaaaaagtggccgactaaaatacataattactctatcaaaatagatcaattactcagtccccaaaataagactttattatctaatacacagttaaacttgcaaacagccgatattattggattaatcggccccaacggctgcggtaaaacaacattgctcaaatatttagaacactacattaatcagcagcaatctttgccaccagccagctacattggtttaaatacgactaaacaaaagaaacctgccacagtagcagatttctttcacgagactattttgagcaaaactgaagttaagcgtcttttagttaaaatggatatgtttgtcgatttgactacaagactcacggatttgagtggtggcgaatttgctaaattagcattaatcaagcagctataccttgaacaagaatctattctattacttgatgagccgactaactatcttgatccagaaagtgtgacggccttggcccaaatgctaaaacagtcgcatctcacttgtattattgcatcccacaattgcaaatttttaacccaattttgccaacaaatctataaaattaagcagcaaagactaattgaattgcactaaagcatttctcttaaacacatatttgctaagcatatcctttactatccccatctatattaatgaagatcacatttggtgctgcagaagtttggtgcgtttctttattatatttaccaccataatactcataacgaggtttccccttgccaaaaggatctattcggcaaagaaagatcacatatgtcgctttgaattctttttccggagagccacctagcccgccatagattatttcttcctgataagcgttggcaacttccagaatgttttctcctggttcttgcgaccctacttgaattattaacccgtatttattgcgcttcttgtctcgcgcaattacatgtacgattgctttttcatctaagacatttctatttggatcatcaagtgattttgcttcctgaatatcgagttcgggaagcattctttgtactgctggaagaagctgctcattatacttcttcataattcctgcagccaagtgatccaccattgccggtgacatttcattttctaacataaaaaaatcctcatttctaaaaatctgagagttttatccctctattacttattacgcaaaaaaacgcaaaaattttttcagaaaatgaagatttttcaattttttagttttcttttctaaaaaatggactgagtagcgatacaagcaggccgtaaataaaataccagcgataaatatctgccaagtcttgattttgaatccacaaaattattgcaattactgtcagtaagccacctaaaaagattgttgaacccatatttttatcagtaaagaagctgatagcagcacctaaggtaattaacgctaccaaactataaatgacgataatcactggtcctttagtctgaacgttaacatcaagcattggtgcgttagtaaacagctgccacacgataaaaccagctaatgcaatgccacatagcaatactagtaatctaaaaacaaaagttaaagtctttttcattatttttctcctgtatgcataataatactagtataacagcaatatcgcggcatacgaaaagcgcttggatttttccaaacgcttttttactattcttttgcttgcataaattgttttctagtgatgtatttgattgatttaacgtattgccccttgtgttgaattgaaatatattggcctgatggatcgtagccgccaacctttttcaacaataaattctttttcgtcttaggattatacgccttcacattgtaataccgctgtgtgcctttatctacttgagcatagcttgtttcctgggaaatgaatggattcaatctatcagtaaaagagttatgaaatgaaaaaatgcagattactcccactactagcactagtgccgttacaaatgcggttttaatagtacttttattcataatattcaccttcatcgttcaactattgttatactaaaatagtacactcattcaatgaatttagcaattgttttcatgaaaaaaacgcttgaaaaattccaagcgtctttcacctaagccaaaaatctttttatagcttcttctacactagcattcaatgattggtgcttcgttgcagcataattagccaatttttcatgtaatgaaggatcaatgcgcacattaaaattacctttaaaaggtttctctggtataactccatcttccttacagctcattagataatcatcaatggctccttgaaaatccttctccaattcatctattgtattaccttcgtaagaaataagactcttaatcccctgaaccttaccaaaaagaatcttatcctccaaagtatattcaattgaaccttcataacccttatacttcatatattgattagtttttttcatctttattcatctctttgattttatcttgaatttgtttgatttgatatggtaatagttcttttctaggatgtggtttatgaagaatgagactgtaaaatagtttgtgtaaggatgaatgattccttaaatttatttctttaaacattagaaaaaggagttcctttctcgtatgattggtttgaacaaaaaaacacatacagaaagaagaactccttcatgaatgattttaccaaagattttgctcaagctctattcaatccagacaaaataaatgatttattgcgcaaagagctacaacaggctgttaataacttgttagaagctgaattgaccgcctttctgggctatgatccctatgccagaaatggctggaatactggcaactctagaaatggtgcttatttccgcaaagttgatacgcaatttggcccaattgaagtgcaagtgcctcgggatcgcaacggtcaatttcatcagcacacgctgcctgactacaagcagcactcggatatcttggaaagcatgattatcaagctttactccaagggcgtgaccaccagggacatagccgatctaattgaaaagatgtatggcagccattacagtccagctcaggtatcaaatatttccaagcagatgattccaaaggttgaggcttaccacaaacgcaagctaagcgacaagtttttctgcgtctatttggatgcgacataccttcctttgcgccgagaaacatttgagcgtgaagcagtctatattgccattggcatcaagcctaatgggcacaaggaggtcattgactactgcattgcgcctagcgagaacattgaagtctggacagagatgcttcaaaacatgaaatcccgaggcttaaagcaagttgagctttttctttctgatggtgttgttggcatgaaaacagccttggccaggacttatcctaaagctcattttcaacgctgtttggttcatgtcatgcgcaatatctgcgctaaagtacgcgtcgacgatcgtgaaaagatcatgaacgaattcaaacaggtgcatcaacagacaaacaaagaagaagccacagctgtcctgcatgacttctataccaaatggggcaaggtttacagccatgttatcagaagcttgaaagacatagaaccagatctgctggtcttttataactatcccaagcagatcagagcttcaatttattcgactaacatgattgaatcatttaacaatgtgatcaagcgcaaagctaagcctaaggcagagtttccaactgaacagtcgcttgatgcttttattggcattcaggcaatgagctacaatgaccattatttcaatcgaattcataaaggctttggtcaggttcaggacaccttagaatcctactttgattaaataaataattaaaaaatcaatttacgagaaagatctatttacacaaaagatttgacagtttctgaagaatgatccgatcactgccctttttaaaaataattctagatccactcgtttttcctttattatcgagttgataatctagttcatgcaatagtgttttagcatctttaaagtcaaacgttcttggatgactatataactttattaatagcttttctaatttacccacgttatcctcacttaagtatataatataatatatcatttgtaactaaatttgcaactaagacaaattatacctaattcgctaaattcacgctactaaaaaagcgcttggaaaattccaaacgcttcttttgtttaatcatctagacctaacttcttaaagatatcatcaacatgacgcaaatgatagtgataatcaaatgcatcatcaatatcttccttggataggtaattcataatttcactgttttcaaccaatggcttaaactgcttttgctcattccatgatttagcagttagcttctgtaccatatcataagctttttcacgagatagacctgcttcatcgatcaacttaagcaacactcgttgagagtaaattaatccatatgtacgatccatattcttaagcatcgtttcagggaatacatctaagttagtcaaaattcgattgaagcggtgcaacatatagtcgacgccaatagtcgtatcaggcaagataactcgttcggcacttgaatgagaaatatcacgttcatgccataacgctacatcctcgtatgctgtaacgacatgtccacgcattactcgagccattccacagaggttttcagatccgatcgggttacgtttgtgtggcattgcagatgatcccttttggccagcgcggaaatgttcctcaacttcatgaatttcactgcgctgcaagccacgaatttctgtcgcccaattttcaatactagtagcaaccaatgctaatgtcgcaatgtattctgcatgcaaatcacgaggcaatacttgactagtaattggctgttgtgtcaaacctaattgcttcattacgctagtttcaactgcaggtggaacattagcaaaagtaccaacagcacccgaaattttgccagattcaacgccttttgcggcatgttcaaatcgttcaatatcacgattaatttctgcgtaccagcgagcaatcttgagaccaaatgtagttggttcagcctgaacgccatgtgtacgtcccatttctactgtgtacttatactttttagccttttctgcaatagttgcttttaattcgtgcagatcttttctgataatctcatcagcttgtttaagtaagtagccttgagcagtatcaaccacatcagttgaagtcaaaccaaagtgcacccattttttctcagggccaaggctttcagacacagttctagtaaaagcaaccacgtcatggtgggttacttgctcaagctcagccacacgctctgcagtaaagcttgcattcttagcaatcttctccgcatctgcttctggcacttcaccgagttctgcccaagcctttgttgcggcaatttctacttcaagccaagctgcatatttattttcgtctgtccaaattttccccatttctgggcgagtataacgttcaagcataaattacatttcccatggattcttcaaaacaatagtttgttcacgatctggaccaactgaaacagttaccaaaggaacgccaaccaactctgaaacgcggttcaagaatttcttagcattttctggaagagcgtcccaagtcttaacttgagtaatatcttcatcccaagctggaagttcttcatatacaggcttacatctgtataattccttcaaacttgctggataataatcaatcttttcaccatcaagttcatatgcagtacaaatcttgatcttgtcaaagcctgaaaatacatcaagcaagttcaagctaaggccattgataccagcaacacgctttgagtgacgcaatgcaacggagtcaaaccaaccaacacgacgtggacgaccagtaacagtaccatattcatgagcagtttcacgaatacggtcaccaacttcatcaagcaattcggttgggaaaggaccggcaccaacacgagtagtgtaagccttgcagacaccaattacagtatcaagacgattagcacctataccaatacctgaacaaataccaccagaaatagtattagatgaggttacaaatggataagtaccttcatcaatatcaagcatcacaccttgcgcaccttcaaataaaactttcttattttggtcaagtgcatcattcactaagacagaagtatcagttacatacttcttcattctttgaccatattcatagtatttatcaaaaatgtcttcaaatttaagtgctggcttaccataaaccttagtaaataattcattctttacttcaaggttagcacgcaatttttcttcaaaggtgtctttttcaagcaaatcacaaacgcggattccaattcttgaagccttgtccatgtaagttggtccaataccattcttagtagtaccaatcttgttagcccccttagcttcttcttgatattcatcttgcttaatatcataaggcataatgatgtgggcacgattagaaattctcaagccactagtatcaatgccactcttttcaagattttctaattcgccaaacattacttctggattgattacgacaccattaccaataactgtattgtccttggctgcaaaaataccagaaggaattaaacgcatcttgaaagtttgaccattaatatcaatagtatgacctgcgttgttaccaccatttgaacgaactgcaactgcagcatccttactcaaaaagtcagtaatctttcccttaccttcatcgccccattggcttcctacgactgcgactgctgtcatttaaaattcacctcataaaaatctctataaatattacgtatgctagtctagcaattaatttacaaataatcaatataaaatccgaattattttatttttaaattatttcatagttcgattttcatattgacaaacacaaattattcccatatagtatgtctcggtcaacaaacaagattaaagggagcagtttttaaatgagtaactactttagtatggaagcctttgactatgatgatatccaacttgtacctaataagggtattatcaaaagccgtcgtgatgcagataccagtgtcaaattcggaaaccgaacatttaaaataccggttgttcctgccaatatggaaagtgtcattgatgataaccttgctatttggctagcccaaaacgattattattacgtaatgcatcgttttgaacccgaaaagagaattaccttcatcaaaatgatgcatcaaaaaggattatttgcatctatttcggtcggcattaaagacagtgaatatgattttattgatgaattagtcaaggaaaaccttaaaccagaatatattactattgatgtagctcatggtcactccgtttacgtgattaagatgatcaagtatattaaggagaaattacctgattcatttttaacagcgggcaatattgctacgccagaagccgtacgtgaactcgaaaatgcaggcgccgacgcaaccaaggttggtgtgggacctggtaaagcatgtattacgaaattgaagactggctttggtactggtggttggcaattagccgcattaagaatgtgcagtaaatctgcttctaagccattaattgccgacggtgggattcgtcataacggcgatatcgctaagtcaattcgttttggcgctaccatggttatgattggttcaatgctggccggtcatgaagaatcacctggtaatgtaatcaaaattaatggtaaaacttacaagcaatactggggctcagcctctgaggttcaaaaaggtgcttacaaaaatgtagaaggtaagcaaatgttagtgccataccgtggctcaattaaggatactttaaaagaaatgaaggaagacttgcagtcatccatctcatacgctggtggtcgcgatcttaattccattaagttagtcgactacgtaatcgttaaagacaatatttttgatggtgataagtaattttaataaaatttttgcatttttattattttcctgttaagaatattacgataatatagtattatctatcttttttcgatagaataatataggtcgagttattgtagggtagtcaataactcggctttttttgattattttttaaaaacgattggacagagttttaaattgtgttatactagttgtcgttgatgaatgcgcccttagcgcaactggatagagtgtctgactacgaatcagaaggttgaaggttcaaatccttcagggcgcacttaaaaacgggaaatggctcagtttggtagagcacctggtttgggaccagggggtcgcaggttcgaatcctgttttcccgataagttagccgcacttcattgaagtgcggtttttttgtgtaaaaaaataagtattccctcggaaatacttatcatgctatgcccctttagtagctcgtctaaagataatctgtgtatctgaatctacatatttcaataacggtaaatcgtaatccttaacctgggccaaaacatttactttctcattgcatggcaaatcgcgtttagtaatctcgatttcgccttcataacgcggatacaaatgattatcaatcgtcacgctgccagttggtctagcataaatattatcttgcggctctgttgacaaaaacatcttttttctgctttcctttaagcgaactacgtcacgcgccacatctggacgattatgccaatcattgccaaacaattctggtatatcagtatctaaatgcagtgtaattgcaccctgtttttgataattagtaatcgattcaattgcatccctcgtaagttgcggatctcccacaaaaatgtgatcgcaatcataatctttcaattctaagatcgcagctaatgggttttcatatcgctgcttctccaacgttggcaatcctgcaaaaattggtccacgcaatttgccatttcctgaaataaaggctgctgttttcaaaccatattgcttaagccactcattcttcttttgcatccagtgtgcatcaagacctgtttcaggacgtgggtagaagttatgtcctgctgttaatttttcaaaatttgcattgctataacgcagatcatcaatattttgttgcgtaataatgctggcatttagaactatcggcatttctttggacaacttggcaataatatcagtagaaaatccatgatctactctaagaccagttagactcaaacttttaatttgctcaacactattgacattaatacccaaatcttgcagatcatctgccgtgacatctgcaataattttcaagtctagtttttgacaccaattagttaagtccgccagccgatttaaaatcgtctcactatcagtatcaggtacagctagctgagtaaaaacgcaggtaaatccactattgcgcatcgtcagcaaataattgtaattctcggacgtcaaatcgtgtcctagataaacagaaaatcctaacattcttattcctctaaaattaattaatttcttttattatctataacttaaacgctttcctaaatatcttactacattttttgcttgcttttttctaaaaaataatgttaaatacatataaacaaattaaaaagcgatgaaaaagacgagtaaataatctaattctttccagtgaattagtgctagtgtgaaactaatagaccctggattattgaaaaacacttttagcagctcactgaaacaacaattcttagagtaggttgagacgtctccggtacgttaccacgccggtggagcatgatagtgcttcatgagtcggtctattaaaatatagacaatgtgggtggtaccgcggaaaaaagcctttcgtccctgtttttttagggagcgaagggctttttctttgctctaagtacattagaaagaggacttatattatgacacttattttacctaaagattatcacccaacattaactgtgcgcgacactgaagctgcgattgtatttattcgtgaaaccttccaagataaattggcagaaattctcggtttacaaagaatgtccgctccaatgtttgtcgaaaaaaagaccggcttaaacgacaacttaaatggtgttgagcgtcctgttgcctttgacatgaaggcaatgcctaaagaagatactatcgaagtagttcactcattggctaaatggaagagattggctttgaaacgctatggtttcggaatgcatgaaggactttacaccaacatgaacgccatccgccgggacgaagatcttgataacttccactccatctatgttgaccaatgggactgggaaaagattattagtaaacaagaacgcaacaccgacacacttgaagttactgtgatgaacatttttaaggcaattaaggcaactgaaaagctggttgctgcacgctacccaggctctacttatcgcctagctgatcacgtttcatttattactactcaagaattagaagatcgctggcctgatctttctccagaagagcgtgaagataagattgctaaagaagaaaaagccgtctttattatgaaaattggtgacaagttaaagcgtagtggtgaaccacacgatggccgtgcaccagactacgatgattggcaattaaacggtgacttagtcttctggtatgaaccgcttaacagtaagattgaaatctcttcaatggggatccgtgttagcgaagaaagtttgcgtgaacaattgaaaaaagctcactgtgaagaacgtgagaaattaccattccaccaaatgcttttgaagggtgaattaccttattcaatcggcggcggaatcggtcaatctcgtctctgtatgttgctgttaggtaaggctcacattggtgaagtacaagcttctatttggccagaagatatggttgaggcttgtgaagctgacgatattaagttgctgtaattttaagatttttttacataccaaaaaagatcctgcaaaatgtaggatcttttttctattgattttatttccgttctcttctagaaatccaagccataatcaatggcaacaatacaaagccaaagaccatcatcgcaatggcataccagttaacaccgataacttgccctgctgcgtttactacaccaaattgtgccttccagttatattcaactaacaagaagatcacaatcacaccagataaaattggcacaataacatcagtcataacgctcttattagcctttaagatatcttcttttgccttaccacggtaaaattgaataactgctagaggtaccacgatgaaacctaagaatctaaccatcgcgctcaaagtaatcaagttgaccatattgtattcaaaggccatcggaatcaaaattgccaagccaacagagataaagaaagttctaattgggaagttattcttagttctcttagttaaagcttgtgacatctgaccctcacgagccatagcttccagaatacgtggagcattaaagctggaagctacgttgatcccaaacattgaaaccaaggcaccaaccaagattacatcacgtaagatttcattattaaaaatagccgcaatcgctacaacttgcttagttgtcattaaagcacgtggattaagtaccatcgctaccgctacaacgccgatatagacaaccgcaataattaagattgccaatggaattgctcgtggcaagttcttttcagggttcttcatatcttctgaaccagaagctactgattcaaagccggtaaaggcatagaaggctgaaacaattgacatgacaaaggtagttgtagttaaagttggcacaattttctgaccattctgagtcaattgatctacttgccctaggttgcttgatgcaccagtagtaattaacaaaactactccagcaataataattaataccaatgcagccaacttaccgatagtagctaaattcattacatacttaactactttttgaccaaacaagttgatcacggtaataattgccatcaagatcaaaaagccaattgtgacatttattgccttattgggatttccgccaaaaattgaaatagttgacttaattaccccaacagccattacgccccaagctacactggctgagaagtaacgcagaactcccatataaaagccaatttttttaccaaaagcggccttggaataagcataggcagcaccagatttagtgacatactttgaagctgccgcaaacgaaatggccagaatcgctgcaaaaattgccgcaattaaatatacaactaaagctttactaccggcttgctgtaccacactaccaggtgttaaaaaaatacctgaaccaataatggcattaatcgctaacagcacaattgaccaaaagcctaatttatctcctgttttttcagtcatctatttgcttccttactttgcattatcaacaacaaacttaaataagttattcataaacgctacatcggaattacggtgcaacatttcagggtgccactgcacggcaatgacattaccttgtttattttctagcccttcaaccacaccatcaggagctgttgccactgcttttaaatctggtgcaacgtctttaattaattgatggtggaaagaattaacgcgaaattcagttttgcccaaaatttcagccaatttactatcagcttccacttccatactatgagtaggcaaagttggcgtatgaccttgcatgtgtttcaaagtaagttcttttctgtatgaaagatcttggtaaagcgtaccgccatgagccacattaataatttgagcaccacgacaaatgccaagtaccggaataccattttcttctgctaactttaacaagcgcatatcaaaatgatcgcgttcaggccaagtagcaccaatcttttgcattggctcctcaccataaaaacgtggatcaacatcatgcccaccagataagatcaagccttgaacatgattaagctgttcacgaatcacctcatcattttcagtaaatggaataatgtaaggcacaccgccattttgaactactgaatctacatagtcttcgttcacataactacgatggtatcctgggaaaattcctctatcgtcaataattacagaacctgagataccgataattggttttgtcatttatgctcctccttctgcttactttttgtatgtaatattatagagaaatttatgcaaaaagtacaattaaaaaattgcattgttgtctataatttttgcatatctttaaatatagtaaaaaacagcaagccttatttttagctcactgttttatgctatttataccaaattccaaaaaggatttccattacatgctaaatatgtttctagccactgtttaaaagagaaatcaaaatattgttcctctattccaggatacgttagataggactgtttttgattgtagcgatctaaattaatgcccatttctccctcgtctcttaaccaaagtataggtagataattaggtgttttaactaactgatttaagacatactcaatagtgtaaattctacaccttgctccacctaattcgatgccttgaaaagaatcaatgaataattctgcaccgttagcctgtatccaaaactctatcaaatcatttgggacagatatgcctgacaacctatttattttattttcagctactggcggatttaatttaaatttacagtaatagacgccaccaaaaccaaatattggtacgtcgacactgcattttttactaatcaaatttatattatctattatattatccattttaataattaataaaccatttagttataagcttatgtgcttcaattggtactggcattaagttgtcaaagtcattatttccaccataaattctaggtcttatatgatgaacttgattttcagcccaatactcttttgattgattgccataacgctcactaaactcttttatatagtaatatctatccatcgtagtccatactggtgaagaaggaagtctagaccaagtagtattgattggtgtttctgcatcttttttagagacaggatcaacatattcaggaaaattttgaccaattttattttgtaaataaatagaactaagtgaaattggataagtagcgctatttccattatagcctaccattccccatgctcctccaacagcaaaaaatgttgtagcagctggaaatacagcagaccctaacaaaccagtagtaatattgccttcttttacaattggactagctgtatttgtagtaattgggccggacaatgatggttcactatagaattgcaattgaactgaaattgcagcaggagctggaccagttattgaatcaatataaaaattgattttaaattgtccatctacatactcttgtgaagtatgaaatttaacaactgtatctggaatctctgccaaaaaagtatatgcagagtaatggctacttgttgcattaaaattattatgaatttttacagttccattttttaaaatagggacatctttttttacattttcattctttaacttatcttgagctaaagaatgaaaattttgttcattagctattttagcaacattcttatttacatcatttagcgagtcagcctttgcatttgtattgatagctataaagcacacgatagtggctaaaaaagcaaataactttctgtatttcatgtttctttcctcattatctataatttttaacacaattataaggatctttctattattctaccatacaactctatcacataagcaagtgctcccacactgtagcatcagatgctactgggatttacactctagattgatgtatacgaagaacacaattacaatcagaataacatgaaatactactatagcgacaatttaaaatatacagtaaaatctttaaactgtatttcttattctaacccttgttcaaagcgatactgccgtaatacatattccttgaaaaacggtaaagtaaaggccacttcaccataattagtagatttgataacttgatcatctaacaagcgtctacgatagttagcaacaaaattgcttggacggtttaacctttcatgaatttctttaattgaaacacaatgttttgggctctgagccatagctaaaacaaattttcggtcttgctttgacaaactactaagtactttggtataaacattttgctttagcaccaataagtactctgatttaatacattctaaagtgttttgatctattaccttactttttttagcagctttcaaaactaaataacctagcaactgaaaggcatatgaatagcccattgtcatcaacgccattttttcaagaatttttttcgacacttgataacctgattctttaaaaactttactatagctagcttcaacctgtgagagattcaatgctgataaagctattcgctttccacgtagtaaaaatgaagttatattttcgtttttcaattcagagatattttcagaaagaccagctatcattaaggctataggataaccctgccgatttaataattgataacatcttgcaaaatctttcaactcctgacatagttttacttcgtctaaggtaatcaacactttaacgtcattttttcttacttcatcaaacatgttcgttaaaatatcttgatatgttaacttactaacgtctgtagaaagcgataatccaaaattagagaaatttagtccttcaatagatttaaatgatttttttagttttgaatctgcattcagatataagctattaataaaagaaggcaacaacttcatccccatggccaaattaacaacaatccaatctggatatgcactaatctttctgtccattgctgtcaaaaagacagttttgcctattccacgcattccataaacaatcgaaattgtatatgaactatttaaattctctattccttgagacacatcagcaattagtttttttcgctgcaaatacactgctggaattcggccaaagctaggattaaacggattatccatattttgtccccaatcattttcttatcaaaaaagcagcaggcttcttacctactactcaattttatttatctttttgatgcttaaccacataaatcagtgccgcaataatcaacactgctgcaccaaccgctactgaaatttgcgtctccggattaatgaacatgaagacaacaattactaccagcataatcaaagcaaagtaatttgaatatggataaagcggcaatttaaacgggtgattctccatcaagtgtggattctttcgtctaaagcgtaactctgctagcaggatcacaaaccaagctaccatccctggcaaaacagatgaactatagacaataacaaaaacattagccaatgatttattcaaaaattgggctaacacattaagcataaaaccaacgaaaattccactggtaattccaatgatcgcatgactaggcacgattctcttagatacgtgaccaaaagtcttaggtgcttcaccttcgtgtgccaatttatacaacattcgacttgatgaataaattcctgagtttgcaccggacaaagctgcagtcaaaactacaaagttaattactgaagctgccgcggtaattcccaccttggcaaaggtcgttacaaacggtgagccaatgctatctaatttattccatggataaattgtgacaatcacaaaaattgccccaacataaaagatcaaaatccgccacaatactgacttcacgcttttaacaatggccttatgcggatcagatacttcaccggctgaaatcccaattagctcaattccttcataagaaccaacaataatggccattgagaaaaagaagcccttgagaccaccagtgaagaagccgccatgactccacaggttagaaaagcctactggatgaccgccattaccaaagccaaatagaattaccgcaaagccaagtaaaatcattaagataatcgttacaaccttgatcatggcaaaccagaattccaaggttgcataagctttcgcactagctaagttagccaccagcaaaaataaaataataattacgccggcaacccaatcagaggtgcctttccaccaaaagcgcaaatactctgttgttgccaccacctcagaaattccgacaacaatgtattgaaacacgtttgcccattcggctaaatagccggcaattggatgcacatgctctgaagcatagtctgcaaaagaaccagtacctggatcaacataaagcatctcacctaatgcccgcattacgatatacaaaataaccccaacaaaaatataagctagcagtactgaaggaccggtccacttaatggttgagctagcccccatgaatagtccaacaccaattgctcctccaagtgagatcatttccatctgtccggctgtcatcgaccgctttaattcaggtgctttcttcgccatttccaactccctttctttagcatctgtaaaaatttcctaggaaatatatctattctcatttatctttaatcactataccttatcattttttcgaacaaaactgtagctgatcgctaaaaagattgcaaataaaatcgaaataatcaaagccagctgcgttgatttgataaagaataataagattaaaataccaatgtaaaaggcaagcgtaagccagctagttactgggtagcccggcattttaaagctgcctaaattctgcttattctgtttgcgataaacaatatgtgctgccataatcatgatccaaacaatcacaaaacaaatcgttgaaacagttgagacaacggagaatatttctgctggcattaaatagtttaaggcaactactacaaataaaattaatgaagaggtcatcaaagcgttcattggaattgcttttttggtcaattcacctagtcttttaggtgcatggccgttacgtgctaatgaataaagtgatcgactagttgaaaagattgcactattagtcgctgacatagctgcagtcaaaacgacaaaatttaaaatccctgcagccgctgtaacaccgatgccggtaaagacctggacaaagggacttgaagtagttgtaatgtgattccatggataaacagacataattgccaacattgagcccacataaaaaaggccgattctaactggcaaagtgttaattgccttaggaatatccttttgcggattagctgtttcactagcagtttgacctacaatttctaccccaacaaaggcaaaaacaaccatttgaaatgataaaagaaagccccaaatcccagttgggaaaaagccaccatgattaactaaattagttagtgaaacataaccgccctttacatgcgtatgaagtaacaacattacagcaccggtaatgattaagactacaattgccattaccttaatcattgagaaccaactttccagttcaccaaataatccgacatttaccatgttaatcaacatcaataagatcacaattactaaagggccaacccattgcggtagccacggaaaccagtatcttaaataaattcctgtcgcagtcaaatcagccatagctaaactaagccagcaagcccagtacatccagcccgctacaaattcggcacgcttacctaaatattttttgattgactctaaaaatgaatgactatcaggatcggctaaaataagctctcctaaagcacgcatcataaaaaaggtgataatccctacgattaagtacgacaaaataattgaagggccagcactatgaatggctgaaccagaacctaagaataggccagtaccaatggctccccctattgcaatcattgttacgtgacgactcttaagcccgcgttttaatctcggcttctcatccataattactcacaccttcctcaaaataaaaaatggagcggcatgttttttaaatgaaacatgttgctccatcaagtttgctttttttgaattatatagtcttataccaattcatgcaattattttttatctaaaaaagatattcccttaggaatatcttcattattagtaaactttaaattggttcaacggccagtaacgtactttaactacgccaacgatactactacgcttaatggttccgatataacggctatccttagaaacgctccggtgatcacccattacgaaatatgttcctttcggaatgcgcccagtatcctgcacatatttaatctgcgctctagtaaagtattgctggtaagtccgcgcccgcatcagtgactgcatagtaaaattctgagtctcagaataaaatgtatctgagccattatcaattaacttcgttccttgtttcaaccaaggttgagcaatttttttattattaatgtagatttgattatttttgctgacgattttttcaccaggcaaaccaataacacgcttaatgtacaaagcacctggttcatctggtgctttaacaatcactacttcaccacgcttgatttgcgcatgacgctcagcgattagccgatcaccattttgaaaagtaggttgcatcgaaagacctgatactgtatcgttgctcaagacgaagtggaaaagcagcagataggcaccgatcaaaataacccagataattaagatatctaggaaaaacttaccccatgattctttttcttcttttttctcagccattatttttctccatttatctttttccacagtttacaactttatggagaaattgccaaattacaaaaaagaggtatttcctcggaaatacctcttttattattaatgactattaattagtcttcttttttgtcttcagttttagcttcgtctgaaacttctaccgttacacccttcttagcaagaacatgagacatcttcttcaagtaaatgttaatgatcttgcccatgtcttgttcagtaagtgagttgaatggaacgattgcgtccaaacggttcaagaattcaggtctgaagtagttttcaagggctgagattaacttgtcttggtcaaccttgccatcttcaagcaacttgtctgagaagccggcgtttgaagtcataatcaagatagtatccttgaatgaaacagttctaccttgtgcgtcagtcaaacgaccgtcatccataatttgcaataatgcgttgaagacttgtgggttagccttttcaatttcatcaaataaaattaatgagtatggttggtgacgaaccttttcagttaattgaccaccttcaccgtagccaacatagccaggtgctgaaccgatcaacttgttaactgccatttcgtcttggtattcactcatgtccaaacggattaagtgttccttgttaccaaataattgaattgccaattgtttagcaagttcagtcttaccaacaccagtaggtccagtgagtaagaatgaaccagtaggtctgtcgctgtctttgaaaatttgcttacgagcaatagcgtcagtaattacatcgatagctctgtcttgatcaataacattcttcttaagtttcttagctaagtccaagttcttttgagcttcatcagcgtgaagttcactcattgggatcttagtcttttgttcaataattgcgtagatgtctttttcagttacttctggagtattcttagaatctacattcttaagttgtttctcaagttcagcaatcttactcttaatttctgaagccttgtcgtaatcctctgccttagcagcttcagtcttcttagcttcaagagctgagatttggttctttaagctcttttcatcagttgattgtacaagcaatgccttcttagcaccagcttcatccatcaagtcgatagccttgtctggtaagtaacggccttgaatgtatctttctgataattcaacagctaatttaagactgtcgtcactgtattttacgtggtggtagtcttcgtacttcttctttaagccttccaaaatcttaacagctacatcagtagatggttctggaacttgaacagcttggaatctacgtgataaagctggatctttttcaattctttggaattcactagtagtagtagcaccaattaacttcaattgaccacttgccaaagctggcttcaagatgttagctgcatccccattgttgttttctgaatcagtagaaccagcaccaacgatgttgtgaatttcatcgatgaataaaacaatgttaggatcgctcttggccttgtcgataaccttctttaatctttcttcaaagctaccacgaagacttgaaccagcaaccatgtcattaatatttactgaaatgatatgcatgttagccattttagctggtacattacctgaagcaattctttcagctaaaccttctacaatagaagtcttaccaacaccagcaggtccgattaaaacaggattattcttcttacgtcttgaaagaatttcaattacgttatcaatctgttcgtcacgaccaattactgggtcaaatttattgttcttagcttcctcaactaagtcaacaccaattggcttttcattgggttgttgtgggttctgttgaattgtttgtggtgcagcacccatgctgctggagtaattaattggaattgaacctgaactgcctttgctatttcttctgctaccaaagtcgtcattaaagaatgagctattcaattcgttaaataagttatcaaaatcattgtcaaagtatgccatatgtgcaacactccctatctcaaatttacgtctttagcactctagcttatcgagtgctaactcattacatttaatagtatagcaggttatccacagactgcaagctaaaaaacaaaagttttacacattttcctttatttttgtgatttttatttaaaaaagcactacaaatgctgcaatataaacatttgtagtgcttcacaaattataaagaatttcttaagatgggcaaaaattgatgattattttgcttaaaactgttgaattttaaggaagttttccacagataagaataagtttattaccataaactatttctgcctacctctattattgcccttttgcttgtccagtattttgcggttcgctcaactttctcggcccaagaaaatactgtttaattactttgattacctgcttattctgaggtaaatccgagtgatccgcttctacacccgttactgtcattgcagtatagctcttgacttgattctgaaaaatatattttccggctgctacgctagcttctggtacaattccatcagactcataattttttccaccagataaggaataaacaatcaagtttttcggtagtttatctttgttcttgataaagttttctagcatttgcgttttatgattaatatttttttcaccaaaattatatggcgttcctagcgtcatcagacgtttgattttaatttcatcagaatagtaacagtagtaatgttctaaccaataggtccagatcaagccaccgttagaatgcccaaaggctttaaaattattaaacttatagctctctgataaggcataaaaggcttgatcaaaccagctggcttgcttcttaatattgctataaccatcgtgattattttcaaaaccgacaataatgaaaggttcgttgtcgtttttattaattttgcctgaatatgacagcgttccattcgttgaaactttaattttaagcacgctatgcttagtcggtgtgttctgatttagctgcttcactaattggttaaaacgttcagtcgttgcactagaacctggaatcataattactggtgacaaaagcgatttgcgtctttcagctctagcgtggttatcagccttcatccaagaataacccggaatagccaaagctactaataagactaagacgattgccaaccatttaaaattaggattttgaactaaattaatcatttttttcttcataatcctttagtcccctttcaagtcgcaaacctaatttcatagttggaataaacattattatatccaaaatgaataacaaaatagaaaataccaagttgctccaatcaccattggaaccaaagaaagagaccaaaattcctggtgtcccacttaaaacggggtaagcacaaggttgaattaaatggcaaaaaattgctccagcggctagtagaatattaataattggaataatcacaatcgccggcagtaacaatggatttaaaataatcggcatcccgaccatcatgcctccagttgagcccaaagctgctggaagcaggttaaccttggcaatattttcactatccttatttttactataaattaggataattacaatcatcgctaaaacaatactcgcaccacccatttctgcataaggataaaacaaagaactacccaaatacttatatggtacattccaagcactcccatgttttaaggcaaaatttaagttagctgctgctgaaatactattagaagtagttgacaaagaagctagaggataacctattcccatccagctaagtaaaaagactgggatagtcagtaaagctattaacaaaatattatttgattcctgtatttgagtaactaggcctttaaaagtactagaattcaagaatttgatttgaaattcataaattataatccccagaactatcccacaaaaaattgcaaatattgtcgggataaacgcattccaggctctttccttaattctagcggcatgttcaaaatcgactggcttgtgttcctttcctagccaatgaaaaatttgccctacaccatagccaattaacaaggccagcaagacagcattaatttttaaaacactggaagaaaatggtgaatgatcgctggcattattagctaaattattggcataagcacaaaacatgataacgatgacagccgtcatcccggccatggttgaatctttacggtataaacgcgcagtataacgtgccgcaaaataagccgcataaataccaaataagccgaaggttacccgaaccatcccccgactgacaaatgctcccgcataccaaaaacgatctggcaaagtgatatcaaaattaaaaatattgtaaataaaactatcgggcgaaaaaacggcatctctgaacaacttaaaatatgccccaattaccgcgatcggcatcagcataaccaacgttcgctgaaaaattctaaagattgccaatcttcttagtttaagaaagatatttgtgattctgtttaccatggtattttcctttacctatctattctaaatatgattgaataaagttaattaaaacaattattaattatacatctatactagaaagctgattatgatggcttacattaacttaaaaaataatactaaaatttaccaatctggtgacacaaccatctatgccaataagaacattactttttctatcgataaaggagaactagtcattattctcggctcatcaggagctgggaaatctactttgcttaatattttaggcggaatggaaccaaatacaagtggcgatgtaattgtagcgggaaaaaatattgcaaaatataacgctaaagaattaactacctatcggcgcaacgacgttggctttgtttttcaattttataatttgattcccaacttaacagcaaaagaaaacgttgaattagctgctcaaattgtccctgatgcgatgagcgccgatgatgccttgcagtatgttgacctagggcagcgagaaaacaattttcccgctcaactatcaggcggtgagcagcaacgtgtggcaattgcccgagccatcgctaaaaagccagccttacttttgtgcgatgagcccaccggtgcccttgactataaaacaggcaaacgaatcttaaaaattttgcaaaatatgagccggcaaaatggctcgacggtcttgattgtaactcataacgccgctattgccccaattgctgataaggtcatccgtattcacgatggaagtattcaaaaagtccagcataatctacatcccgctgatattagtacaattgaatggtaggtgggcgacatgcaaaaaactattctatggaaagatgcttggcaagcaatcacccattcacttgaccgttacattgccattattctattaattgcactggggacttttgcctttacaggtttaaaaatggctggtcctgatatgcgagcaacaggggcagaattttttgccaaacataacttagctgacgtcactgtcacttcaaactatggcattaattcaactgatcgccttactattcagaatttaccggaagtaaaagaagctacttttggctattttcaagatgttaaaattaaaaatcaacctgatacgctccgcatcttttctcaatcagataatctttcaagttatgaattgattaaaggtcattttcctaagaataaaacagagattgcactgtcatatttattgcagaaaaaatatcgcttggggcaaaacattacttttaataaacctggcattttaaaaaataagacttacaagattgttggcttcgtcaaagctagtgagttcttagataaaaatccaatcggtcaaaccaacattggcagtggccatttaactggaattgcggttgctaatcataacgccttcgccgcaccagtttatcaaattgcccgaatcattttcaaaaataccgccaatttaagtccctttggcatagcttaccgcaaccgtgtttataacgatcaaaccaaattgcaaactgctttaaaccaaaatcgagccgacaaatatgacaaatatcgggccatgtatcaaaagcaatatcgacaagctgcagctaaacaattacttaaacgtggcatcgtagttaacccggcgcaaatcaaagtaccacagaacaagcttaaaattgcttatcctaactacgtaatcaacagccgtgaagaaagtcagggttatgcttcttatcgagcagattctgaacgagttgaagttttggctaatgtctttcctgttttcttgtttgctgtagcggctttggtcagcttaactacaatgatgcgttttgttgaagaagaacggactaatattggtacgctaaaagcactaggctatggtaatggagcaattgccattaagttcttgctctatagcacctcagctgcaattttaggtgttattctgggggctagcttaggttacacctttttgcctaacttaatcatcgaggcctatttagctagctcaaccttaggaactgattaccagctgaattttgcttggggaccactattaatttcattgacgattgcactacttgcaacaaccgtcgtttcaatgattactttagctcaaactctgcgtgaacagccttcagctttacttttacctaaaccacctaaaaatggttcacgtattttactagaatatattccatttttatggaagcacatgagcttttcagctaaggtaacagcccgcaatattttccgttataagagcagaatgctgatgaccatcctaggcgttgctggttgtactggattactagtaatgggatttggtattcgtgattcactacacggaattggcaatattcaatattctgaagtacaaaaaaatgatgtcatcgctttgaaaaaccgccatgttaacacgactgagcgacaaaaattaaacaaaatttttaccagccatgatgttacgcaaactactgctgtacaatatcaacaattgactaaacaccttgatagcactggagcaactgaaaatgtaatgctaattgcgccacaatcaactaaaaactttagcaaatctatcaatttgcaagaacgtcaaagcaagaaaaaacttgttttgtcaaataatggtgtagtcatgtaagtgtcaatgtttttgcggtagtctttaaaccattagtctaaccttaatttcttaaatatttatatgacttaaatttctgcttagcttgcttaaataactattgccagctacctgtgcggttaatgcgccatgctggatgcctaaatgaacttcatgacgcttctttaagctgtcacgggccgctgcttttaattcctgttcagtcaatacagttatttctgaatcttcaaactcgctgctaagccaaaattccagctctcgattcttgatgcagcttaagatcctaagcatgccttctgctccagattttgaccatttcttgctttgccccttaacacggtaggtatacttgcggtggttgctctcgcagcagccaatggctttagtcacagtcagttttcgtttcttaaacggcttaatatcgtcccaatgacgatcaatataattccttaggcgccccagataatcatgattgagctcggtattcaattcatcaattagtcggctttctgcagtggttaggatagttttaactttgtcatagctgtatttgtattccaaagcagaaatcagcttgccttgcaggtcaggcgcaaaatatagcctttctttgattttcttatttaggtgaaagacatccaagaaatgctcatgacgcttgcatagccctacaatgtcatcgaagtctgttttggcatatccagcaccgccatcggcgttgctaagaattacagtatcagaaagatcataagtattggccaggtactccttggcttcgttcagcgcatcaagtcggcttaaagaaacaaattccttggcattgattcgctttctgcgtttcttgcttatattgacaatgccttcacagacctgatagcgatgaaattccaaccggcttttagtgcctttgatcaccacgccatcgccttcaagatacaaaactgggacctttttcttagtgcctgcggcatcatatcttgaatctgcttcttggcccgctttaatatttttcccggccatttttaccaaattgcccacctgcatatggctaatattaaagccagacaggcaattgactgctagagcagtattgcgataagtggcaacgctgcttacttctaagatgtttttgactgctaaaatactgtagcgcttgtatttgtcaaagcccattaattcatccaagggataccttgcttgtttgcctgggcagacatatcttcttctgacatacctaacttcgccaaaagccatattgattgagcgctcattcttcttatcaatctgatagccctgtgctttaaccttggtaatcatttcatcatcaactttagctaaagccaaggccatgatttccttaatcaggtttaagaagaaacagattatttttctttcacgcttaatataattatcttcagactttataatatttgcgatttcagttacaattgaattcataaaagaccagcttctaatgtgttttttgttcttaacatcagactactggtctttttgtttgagctcaagtccaaattcaaaggacttgggcttttttaattatttattcaacttaccgtaaaaaattatacacttagtgtagtcatttcagaaaaattagctactatcttgcacgctcataaaggttcaacaatttccttaaaaaatgaacatgggaaactacttaagttcaaagttagtggaatctgcgaaatgtatctcggtcactatatctttatgagcccagctgaatatgccaaagaaactggcaaaaaatttactactaatgcctatttagtaaccatggccaaacattccccaggaaatatcagccatattagtcaaaaaatgatcaaaacaggcgcaatcgaaacggttgtctcaacttcatcaaatagaaaattgctgagcagtttcactggtagtctaaatgaagtcattctaatcctaattttaatttcagggatgttggccttagtagtcatctataacttaactaatatcaatgtcgctgaaagaattcgcgaattatcgaccatcaaagtgctaggattttacgataatgaaacaacgatgtacatttatcgcgaaacaatcatcttatcggcactaggaattatcgtaggctttggctttggttggtggctacaccactttattatcactagtttgccaccagatgtcgcgatgttcgatccgaatatgtacccgttgaacttcgtcttctctgcgctaattcccgctattatcaccgctattttagcaattgttgtccatcacaagatcaagcgaatcaacatactagatgccttgtcctccattgattaagcgctgttatgctataataatcactatagaaaagggtggaaaaaacatgccaagaaagcactttgaattaaacagtgatgttaataaattaatcgaaaaatatgatgaaattaataatgttgatttcaataagttagttaacaaggccttaagattctaccttgttaatcaaatgaactacaaagatgttcaagacgccctgaataaagctgataacgaagcttctaagtatattgatgaagcaatgcgttccagcatgggtgatattaatcgaaattattagaacataactaatcatggaaaaagccatctgttttgacagcaggtggcttttagtattcattacaagataatttattataaaaacaactaattgataatttctttactcaaaatgcttataccgataatatcgataacctatctttttaccaaaaatcgtctccgaagttttcatccaattagccagcaaaacataaatgcctaaaaagactaaaccgaagattgctaaataaccaaaactaccaacacggcctaagtcgttgaaacgatagccaaataaaatttggtaaacaaagagcaggataatgtaaatctcgtttgaaacaatgatcggcaacaaactccccatcttaacgccatatgtcttattaagcttgtgataactgagccaaattaccagtaagaatgaaatatcagttgaaagaattgcaccatccccattcatgaacatagtcatcggtacttgcaaaattatttttactaagacaccttcaaccatatagatcacagccagtttgttcatgttcaaagctaaaagcagtgttaatgaattcatcaccaaaccagcaaacaaactttgaacaatattttcaaccaaataatacgcacctaaactatcgtgtgagaacaagaccgtataaattggagaagccgcaaaagcaccaagtgcaacaaccggaagcaagacaaataatagtagtctatagttctctaaaagcagctttctaatgctttcttgactatcattagccttatacttaagccctgctaaaagcggcagactagtctcagaaacggctgtcgcaagtgaaataatcaccgtggtaatcttgcttggattagccgagaaaattgtgtacaagtaactaacatagcttttactcatatgactgaagctaatcaggatttgtttaaacaaaagttgatcaactaattgcgtaacagtaatgaacgatcccagcaaaacaaacggaattgaggcataccataagttaagcaaactacgagaaacattattaagtgctctgggctcgctattttcaattaattctcggtaatgtccccactgcttgcgcatatatgcaaaaagatacaggtaactagctatagcaccaacacaggcgccaaacacactgaaataaaccgccgttacgtaatcatgatggaagacttcaataatcaacaaagtagccagcaaaataaacaaaattcgagcaaattgttcccataattgggaaatcccatatggcttcatatcattatttccctgaaaccaacctcgaaccatactcattgatggcagaattactacggctggcactaatactcgaatagaaattgttgcactagccactgaatccactggactatttttggcaatcattggtgccgtcacataaagcaaaataccacacgctattcccatgaccagcataatagcgaagcctaatttggtaatgtacaaactgtctttatatctattttgcgaatttaattgcgatacttcccgggcaataactgaaggaagtcctgccgtcccaattgataaaaacagcgcatacggcgtatatgacgaattgaacagcgcctgtgcgtttaattggttgtggtagcttcccagcataattagccaaggaatcaaataaacaaccccgagaattctagatacaatgctaccaaacgatagccaaaatgaaccggataggatttttttattcaatagaatagcctcaaatctacgttagtttctcattgtgccttcttattatacgtggattttataactttgtgggaaatatgtaccaactagttacccttttttaacaaatttttcggctctaataatacaaatcagttacattatttactatattgttacccagcctttaattttacgttagaccccttgacctaaccttctttaattattatccttaaaatgtttctgttaaaggtcataattagacaaaaataataatgtattaagaatattcatcgggggaattaagttgtcattcaagaaaaagattatcactaaattagcttatgttgctatgctttcaactactggcgttgccgcagctgcaatcgtgcaaccacaagcacatgttcaagcttctaccacttcagttgctgctcgctcactcggaatcgatgttgctagttaccaaagtgctgatctttcagctcacgctaaaagcggtgctaagtttgctgttgttaaagtaagtgaaggtaccagctacagaaatcctaaggctagtgctcaaatcgctagtgcccgcgctaagaatatgatgccaatgggctaccactttgctacattttctgctaatagcgctgctgctaaaaatgaagccaactacgcaatcgcatcagctaaggctgttggtcttggtgctggctcataccttgcatgtgactatgagtcaggtgacggcaacaatatctatggtggtaagaatcctactgctaatgcaattaatgccttcatgagcaaggttaaagctgctggttacaagccacttctttacgctagttcatcagttttaagaaacaacattaacactaactctgttgttaacaaattccctaactcattatgggttgctgcatacgctgtttcaggtcgagtagacaatcctaactttgactacttcccatcaatgaagggtgtttcaatttggcaatttactgacaactggcgtggtcttaacgttgacggtaacattaacgttttacctcttacttcatcaggtagcgctgtttctcaagcacctaagaaggctcgcgtattaaagaagaaggctcatgtatataacaaggctggtcaccgtacaggcaagactattaagaagggcacttctatcactacccatggcaagaagaaaactatcaatggtaagaaatactacaagattgccaagaatcaatacattagatcagctaacctttactaaaaaggcaaaataagtcatcaaaaaatgcaccaggtagaaattacctgatgcattttattttatccaattttttacttggcgaattgttcaccagctaagttacggtagaagttagccttagcttgacggtaatatgggttaacccacaataaaccgatcccgcaggaaataataccaagtagccaccagccgatgaaacttaaatcaaaaataaacaagtccatcttatggccatccatcaacttacggctggcactgatagcttctgtggcagtcggctcatgaccactatctagcatgtcacgcaagatatatggtgtcactgcatatgaataagccttgatcagccctggaataatcagtaaccaagtccacaaaataagaaaaatttcatataaaatataagttaaaaagttactcttaaagtttctggtaaatggactaaagatacctgaaagaacattttccttagtaccactatctctaaaatgcaagatagtataaattacgccccatgtgattaagccaattgcaactgaaactaccaaagtaatcagccatgcaaaaggattaactcttactttatctaggtacatcaattcagcattgttaccgaagcggcggacaataccgtacacgatatcttcgcccttttcaaaaaagttttcgatatcggtcaaaatataaacgattagccagccaacaaatgacagcaaaactgcccagccccagttaccacgtaactggtctctagcttgttcttttaattcttttcttgtagtagccattttctctcctcctcacttttctaatcatgagtattgtcgcctaaaatcagggcagaatcaattaaaagcacatcaaaaaagcctaattccaccaacatcggaactaggctcacacagtgttgaccgccactctgaccacatatagaagataacattttcgctaccggagaaaatgactactaatagcgacggtacatgatagattttagcattcaactacctaaaagacaagcgaaaagacgtgttgaattagcggaatggataccaaaatttacggataaaaaagacgaggtctaaacctcgtcttcttcattactaaaattcaagcatcatcgtcattgcacgattgatcttctttttaatctttttaaactcaccagaagcagtatgattatcctgcaaaatgatcatgttctggccatctttagttgcccgcataaaggtataatacccttcaccagcaccattagcagctttataatgctttaaattataaagtccaccattataatagctaggagcctgacccttgaacagaacttttctactcttgttagtcaaaatcttaccagcaagaatatactgcatggtcttagctaaatctgcgttagacattacgattgaaccagcacccagctcattgtgagcatccttaacggctttagcatggttcactttgacatattcaccctcacgcatttcatagcctggtacccaatgactagccaataacttagccttgtctgaccacaagaactcactatgggttagcttcagtggcttgatatatgtgtcatggaacaattgctcgtatgactttttctcaagcttggacaagattccacaaaggaaaatatagtttactgaagtatagtgccacttacctaatttgctagcatcaaacacagtatattgtgcatcatgcttgatgttcgcttcatcagagataaactcaggcgtacctaattgttgaccagctttcaaatccagccctgatgtcatatcaattaagttgctaatcttgactgaactagcaccatctacatttgggtagaattttgaaagtttatcgctaagcttcaactttcctttctctacctcatgcatcaccattgcagctgtcattgacttttgaactgaattgatcaaatagctagtgtcaggtttattgtccgtcgcataattaagcaaaactttgccatgatttattactaaaactgagcctttaacgcccacatggtcaatagcctggcgcactattccgcttttaaacggtctttattgcttaaatcaactcgtttaacgttatccttgttttgccacttcttggagtagaagtagttagacatatcatagtcataacgcttattaggttccttcatgaatggacgaacagcttgatcaactgcaacccagcctttccagcctaggtgaatagtatcttgcataaagtacttttcattgcctcgtcttgaaagatctgcaatattttcaaagccttgactggttaactggtgttccatcttagcaacagactcttggtacatcttgctagataaaccagtgtacttcatccacttgccattaattggtgggatgataaatagcacattagtgtgttgcttagcaaactgctccaacatcaattggaaatcaccatattctactgaatgtacatagtcaaaatcacgctgactacccttcaagcgtttcaataccttcttgggtaaacgtgttctaaagaaggtattatcaatacctaagttgtttgagttagtgtgtatagcagcttgctctgctgcaaccttattcaaagcagctacagaatacttgttaggtaaaaccttagctctcttttgaatcttatttacacgatcacgcaattggaatgagctgaagaaattatcttcgttacgcaacattcgacgacgattttgtaaataaaatttttggaagctagtcaacttcttgccttgagcaatttgcttaaggctattcttgatctcgccctttacatttggcatttccaacagacgtttagctgcataacgatcagttttattattcttggcactaagcaagaaattacatgcttgcaatggtgaataatacaatgcaaaggcattaggatcttgaccccgcttagtaaaccattgtggtgaaatgatcacaacagccttcttgtttctaagctgcttagctgttccttgcatccccaagaactgagccaaagattgactacccggtccacctaataagaatggacggtagtttctatgatacttttccgcaattacactagggtgaagtgggtcgaatcttgacaactcacttgaaccatagaatggcacgtagccatcttcaaaagcttcctgcttcattgtgctgcccttgaagacagttgtgttttgtgaagctgcagcctcgtaaatcgtttgcttagaaaaagttctttcccaaggaataaggaaaacaactaacaaaaggataaaagcgcaaagaactgggccaaagatttgccacagccggcgtttattactcattttctaagctttccacctttgccacaatcttgtttggagtgtcccattcttcacggttaaattctgaaacaggaacatcaatatcaaacttttcttgcaagttcaaaagcatttgtacacttgccattgagtccatcaaaccattgtcaaagatgttttcatccatttggtctgataaatcttcaccagttaagtcatttaaaatatctaatacgccttgttttgtatccataattaatacctctcaaaaaacaactcaatacttattctacttccagccgaaccacagttgacttaggaaccctgagaaaatcaagaaactgaaacatactacattgaaggttaagaaaatggcgaaccatttagtaaacttgttagatggaatttgcttcttatgctttctcttgaatctaagccacatatcgttgatacaaatagctgaagcatggaagataccataaacaatataataccacgttaagccatgccagaaacccatgattaagaacaacaggaagtaagaaacttgtgataatctaattcgattcttaaacattttcttcttcattgcaaagaaagtgaatcgcatgtagatgtaatcacggaaccagaatgataaagtaatgtgccaacggttccaaaaatccttaatgttcttagaaataaatggcttgttaaagttcattggtgtatgaattcccataaagtatgagattgatacagcaaacaatgagtaacctgcaaagtcaaagaacaggtacatactgtggcaatacatgtaagctacaagccaccatgatagcttcaagccgccatttgcattaccaacggctaaagcagcagcactgatctttggtaacaaataagtgccaaagaaccaaccaatcacaaatttgtataaaaagccttggaataagtatctaacagcatactgcatatctgtaatgtatgcatcacgcgtaggtaccttatcataatcttttttaaatctgcggtaacgatcaataggacctgacgaaatagttgggaagaaaagcaagaatcttgcgtaagtaacaggatctactttcttaattgccccatcacgcatttccataataacttgtactgtcttaaaggttacgtatgagattcccaagaaaccaatgacaaagccaattgagttatcaggaaaagcggtcaaatatttaactgcggctaatggaataattgccaaaatcacagccaaactaaagatccaagtcttatttttaccgtggtgacgataatactgataagcaaaggttaaggcaaattcgtaaaccaaccagattaataggttaaccccttgctcccagtgatcaccatcaaaaatcaagaacaagaaaacaattgaaaaaattgcttcatatgtcttgagtcgatgaccgtaatatagcccaatgataattggaattaaagcgatcatcaaatagatgaaatattgcggattagaataaggctgtaagttaatgaaattaaaattcactacttattaacctccttaattaccgccttaatatctaccttaccattttgtgaaataggtaatgcatcttggtagatgtaacgctgtggaatcatgtaaggcattatattcttagctaagtcttcacgaatcatcttagttaaagcagcttcagaatactgacgacgaacgccttcttttaattcgatttcggcaacgatctgcttaacagtgtggtccttattgtacttaggagcagcaacgccataacggacaagcttgttcttagttaagtagaaattgatttcttcaagttcgattctgtaaccattgaacttgatttggaagtcaattcgaccgcgataaaatagcatatcgccatcaaagaaaccagcatccccactccggtagctacgatactcagcaccatcttcatggaaaaaggcagcttcggtcttttcaggattgttcatatatcctttagaaacactaggaccactaatgataatttcaccttcgccaggcttatcacccttagaagtatcaattgtaatcttagtgtcttcttttaccttaccgattggcaaacggtcatactttttaagaacttcatcagtaatttcaacttgagtaacagcaactgttgtttcagttggaccataggtgttgaaaatatgactatctgggaacttcttcttaagcatctcagcttcactgtgtggcaattcttcaccacagaacaagaaatgacttaagtctggatggtgttctgcatcaaaagtcttgtccaagaagcacatctgtgcaaatgacggagttgatacccaaacattgaactgcatctttggcaaagtttggaataatttaccaaagttttgagtaacatcatgaggcaaaactaccaacttaccagcagaaacaagtgctggataaagactcattactgacaaatcaaatgagtaaggtgcttgtgccaagaaacttggatgttctggcaaattaaagtctgacaactcccagttaacgaaactaagcaaattgtcgtgactaatttgtacacccttaggtttaccagttgtacctgaagtaaagataatgtagtagttctcatcaccttcaacgaagttcttctcgtcaacttcaaaattgtcgtcttcaacttcgctagccttaagaaccttaacatcagttaaatcaacttctggtaacggatcaatttccaaaactagtggtgacttagaaacgtcttgaatcatcgttaaacgttctgcgttagaatagctagcaattggaatataagcgtgacctgacttaacacaaccaagaaaactagcaatcatttcaaaagtttgtccgccccaaatcataattggagcatgctctggaatatctaagctagcaattttatgtgcccacgcatttgaacgctttttaaggtcaccatatgtattagtttcaccgagatagtcgtaaacaacacgatctggttcgtttgcggcgatctcatcaattttcttaataacatcttgaatcatgtgatagcacctaccttaaaattcattataaatgaagtgaacagatgttagtccactatattcatataaatagataagagccatcaggattccgaaataaacaattgttttcaaaacaaacataccaatacgtctgcctcgagaatcaaccttcgtctttttattcattttttctcctttaggtaatcttacttttgcctttgccctatattactacaaatagtggcaacaaacgcactaacggcttatattttaacaaatttaaactttttcttaaatcttcagttatttgtttcaaattgcgaatgcgttttctttactgttgtctcttgcaatcccgataagcaaaaaataatggaataaagataactattgccacaaaaatcaaagcaaagatcattaagcgccatacattctgtggtttagtccacattttactctttgccgtcgccaacaaaaatgccgcaaataaagcaataacaattacttcaaccaggcaaaaaattaaatgagtattttgccagagatataagtaggttgttgccggaaataaacaaaaccaccctgaaaagcgtaaaagaaagatttcttttttacgataatctactttcattatagtttcctttcctcattaactgccaaataacgcattaatattcaccgacaaaatccggtccataactacaatttctggtctggcgtagatcttagagcctgattcaaacacacatagtagttgtcccttataagcggtaatttgctctaaatatggcggcatggtaattaccagttctgcattcttttcgtctaaagcatttaaagctgaagttggaaaaacgtagagcttggaatcaccactaccataagattggctcaaaaaaattttattttggtaaattgcaattccttgaatttgcttatccattgaagtttcgccagttggatcggaccattgcagcgttccggtaacagatttaacttcattattagtaattgagccacgatttttaccactacgcgctatagtgtaagccgcaacttttcctcgaccatacatgttaaaaaagccaacaaacaattgaccatcataatatgtaacggtcgatgctttttcaactgcaggaatggcaatttgatatttatacttaattggtatttggctgccctctttataggcccttaattctgccattgaaaatgctgctagcgctgaagatttgcccattgagccagttatccagatatttttggctactggatcataagcaatcccacctaggtgtggccgaccaggtatttgaatcgttttaagatatttgcctgtcttcttatctaagacataaacaaccgaagcatgctcatgttcaccatcataagcagttagcaaaatatacttacctgcaaccgtaatcccctgtggtgtcattgcagttgctgtattgacctttttagttttaaaatcataacttttagtagcaactaatcccggcaaaacaaagtcttttccatcccacgtccgcggtggtacataattggcaactttattaataaaaggatatttttcacgcaatgctttttggtaattggcaaaattatgccaagcaggactagtgcttgtcccatccttagcaattttttcttttggccgttgacggatcatctcctgcttctgccaccattggtaaccgaaatagcctcctgcaccaatccctgcaagcaaaagcagtactagcaggaagcgcaaaattcttttaccaatttttttcaaaaaattactcccttctgtttaggaattgtccctattatgcaattcattataacgaaaaaacaattactttttgtttttaactccttgctataagctttatttactaaaaagataaatttttttgcaaaaaagtgctttcgtcacacttttttcacaaattaaggttatactagtaaatgtagtgaggaagaataatcctctactacaactcaacttttttgtttttcattcatactcctccaagtaaataatgaaaataaaaagaattgacttactccaattagtcaatttcatatctatccctttcggctcacgtgcgttgcgtgagcttttcttataccttaacttattctcaagcaaatctttaccttttcataataaattgaacacttttacttcacatttacccagtattatataaaccgtagcaagatggtagaaacttgctacaatactcccacttttttatttcattcattcttactcctccaaagtagatgaaactaataaggtccgcaaaaacttgcgggccttttcctttttcagcacttttttctgtataattaaggtagaaatgaggtgccgctatgttttcaccatcaatcaaacatttaatagaagaaaaatctggttcatttttaatccctgctagccgaattgcctttgtccaagcagacaatcctctttatcatgcctttttgattttgactaaggttaaatattcaaaaattccagttttagataaagaaaaacgagtcgttggcctgcttagtttggaaatgattacggacaagatgctgacgactgatgagatctccactgcccctttagataaattaaaggtcgaagatgtaatgcaaactaagtttgataaaataaacttcgttgaaaccaccctagaaacgcaactgcatctgttaatcaataatgctttcttgcccgttgttgatgatcgcggcgtgtttcagggactacttactagacgcgaatggattaaggcatttaactatgtagttcacacttatgacaaacactacgaaacaaaacgaataaaataacctccaagcagcctttaaggctgctttttttaactccaacatttattgagcaaaaatgtgtccagaccaataaagaatgttagaattaagcggtagacagatatgtttgtattttggggagggcaattatgaaaaatttaaaacgtcaatggaagtttattgtcgttttgattgctggtgcagttggattaattagccaatttgcattgcattcaaagagcctattctcaatcgggaatcttcaatttccagttcatgccatcattattgatatcattggtatcttgatggcaatttctttactattggaaattttccacgattggaagacaggccgttacggcgtagacatcctggctgttatcgctgttgtttctaccatattgatttggtaatgatgaccggtggtgaaacgctggaagattacgcaactggtcaagccaacaaggaattacgtgccttgcttgataaaacgccacgtatcgccaacaagttagttgacgggaagatcaccgaagttaaggttgatgacctgcaggtcggtgatactgttttgatcaagccaggtcaacaagttcctgtcgatggtcaaatcgttaagggcacttcaagcttcgaccaatcttcattaactggtgaatcagttcctgtgaccaagaaccctggcgacgaattaatgtccggttcagtgaacggtgatgtagcggtagagatgaaggtaactaaggctgctaaggactcagaatatcagtctattgttgcgttagttaagtcttcacaagctcaacctgctaagttcgttaagatggctgaccgttacgccattccgtttaccgttatatctttaattattggtggtgtcgcttgggctgtgtctggggatgcaactcgctttgcggaagttatggttgttgcttctccatgtccactgttgatcgctgctcctgttgctttggtatcagggatgagttcaatgtcagctcaccatattattgttaagtctggtccaaccctagagaagttggctcgcgctaagacctttgcttttgataagactggtactttgactgaaaaccaattgatcgttgaccaagtcgttactgatgacaaatcatttgatcaaaaagaattgcaaagcttagctgccagtgttgaacaacagtcaagtcacgttatcgctagttctctagttaaggctactgacaaggatttaattcatcccgtaactaaccttaaggaaactaccgctcaaggtgttgaaggtgatgttgatggcaaacacgttaaagttggtaagttatcctttgttgcgccaggtcatgaaaaattaaacgtcacttcaactgctgtttacgtttcagttgacggtaagtttgctggttacatcactttgaaagataagatgcgtccagagagtcctaagactattgaacgtcttcgtcgtcaaggtgcagaagatatcatgatgcttaccggtgaccacaagcaagtcgcagaaaaggttgccaaagaagccggcattactgatgtccgctcagaacttttgccatcacaaaagattcaagctattaaagatgtgccaaagcacctacgtcctgtcgttataactggtgatggtgttaacgatgcacctagtctgaccgctgctgatgttggtattgctatgggtgctaagggtgctaagggtgctactgctgccagtgaaagtgccgatgctgttatcatggttaacgatatttctaaagttaacgatgcagtcgctatttctaaacacacaatgaaggttgctaatatcgatgttttaactgcaattggtgtcgttattatcattgaattgattgccttcactggtgttatcccagccttctggggcgctattttgcaagaagtagtcgacatgattacgatcagcttaggtttacttgctaagactaagccaagtgataagcaatttggtttggaagaaaaatagattagatgtgaagaagctccagaatcgatttggttctggagccttttttcatacataattatgcgtagcactgcaccagttcaatttgcatctaagttaaaaaactattaagattaaactcaactaaataatttttagtggttgggtttttatcacaataaaaactttcaagattcgcttctttgggtcaggaagcacttgaaagttttttgtttttttacagaaggggaaaatatgcattttttaggacaacttatcttaatcctcttaactacagttttgctggggcaattattcgcccgcttcaatatgcctgcagttattggacaactattatcaggaattttactgggaccagctatcttaaattgggttaagccaaatgatatcatcagtctattctccgagttcggggttattctgctgatgttcttagctgggcttgagagcgatctagatttattaaaaaaatacttcaagctaagctttactgtcgccacagtcggcgttatcctacccgttgttttcatgggcttagccagttacttctttggcatgcgccctcttgaagcactctttatcgggattgtctttgcagcaactagcgtttctatctccgttgtggtgctgcaagaagcacaccaactgcacacccgtgccggcacagccattttaggtgctgccgtagttgacgatatcttagccgtggttgttctgagtctattcactacattcagtcatgaaggtggcaagagcggcttaactaataactttttgcttaatatcttgattgaagtagtttacttcgtagttgtttggctgatttttaaatttgttgcgccatactttatgaaagcttctgaaaaaatcgacgttgactattccgtcgttatcggttcattggttttagccttaaccatggcttgggccgctgattttgttggtctttcagctgttgttggtgcatttttcggtggtttagcaattcgtcaaacaccacaatacaaagaagttcactcctctgtttccgcaatcggctactctgtcttcatccccgtcttcttcgctgatatcggtctttcaatgacttttgccagctttttcaaggatatctggttcattatcgttatgaccgttttagctattttatcaaaattctgggccggaaaatactccagcgaaatctttggcttcaataagaatgaaggcaatatcgtcggtgctggaatggtatcacgtggtgaagttgcactgattgtagcgcaaatcggaattaaccaccatctcttccctgaggatatttattcaagtctgatcctagtaattatcgttacaacagttatttcaccatttattttgaattactttattaaaaagagtcaaaatagtacggaatttatgtagaaaaagtctagcattcgctagattttttaatagtttaattttacaagtggcttatcataaacgcaattgtgtctacatggtaaaatcaatagtgagaggtgagaaatatgttacaaactccaaacaatattagagctgttaccgctcgtgacctgcgcaataattttaagaaaattgctgatgatattaatgactatgatactaccgttatagtagctcgtcccaaagataaaaatgttgtgattatttctcaaaaagaatatgattcatggcaagaaacttcatatcttctaggaactaaagctaaccgcgatgcattagctgaagctaaacaatcatttgaaaaccaagatcaacgaaataaagttttaaccccagaagaattcgaggctttaactaaagatgacgaagcttaaccttaattttaactacaatgcctggaatgaatatcttgaatggaaaaaagaggataagaagacttcccaaaagattgataattttattaaagaatgccaacgccatccttttactggaaaagggaaacctgagccattaaaagcgaatttaagtggtgcatggtctcgacaaagtaatcataaagatcgcatggtttattcagttaccacaacagaattacaaatatggcagttaaaataccattattccaaatgaaaaagctctttcgagcttttttgtttaacccaattttcctaaatcgattacttggtcatacttctgcaactcatttgattcatagtggtgaattacttcaataaaggtaaggtttgagtttaacaagtaattatgaatttgatctgatgtcttcttatcaagggatgcattaatttcatctagtagcaaaatcgatctatcggccaaaattgcccgtgctagttctattctagctagctgtcccccagacaattgatccgcattatcacccaaggaatagtcccagcccttttcagcaataatttgatccaaacctaatttttggcacacctcgctcaccttttcccgggaaatatttgcacctaaagttaaattaaaccacaaggtatcggcaaaaattactggggactggctagcataagcgaataaatctgtaaacgagcctggcttttgctttttgtcgttaagcaatatttccttggcatgaccatgctttccggttaataggaattgtaataacgttgatttacctacaccagatggtccaataactgcaactttttgaccttttacaactgcaaagttaatttgattagctaattccttgccttttctagtaagatccagatcttctatttgcaaatttgcaaaattataattggtctctttcttttcaaccttgcccttggcaatatatttttctgccttagcgacaattttcttagttgttgataatttgtttcgatcttctaaaatagtcaaaattggattaagaaatgaatttgacagttgaacgattgcaaataaggcacctaaagtagtttgacccttaaccaccatgtaaattcccactaagaatggggttaagaacgtaaataaactagcaatcaagttaatccaagaattagtatctagattgagtaagttcattttacgcaaagcatcttctaattgattgatcaaaacttgatttttcttaaccgcattatcgcgcttgttgtataaatttaatgttgtgctaccagccagaaagtttttaatatgactaacatatttatcattagcagttgtccaattttctgctgcagtttgaatcttcttttgaaataaattagaaaccagcatcggcaaacatgaaccgattaaaaataataatgtaactaaccaattaacacataaagcataccctagcgcaaaaacaatcatataggcctgcatcattatttcaatttcagcatcaaaacgattagtttccagcagcttaaaatctgtagtcaaaaagcctaagctagcagtattttcttcgctagtctgacccagcatcccctttaaaatgccagctcgcagcgtcgtattagtctcttgaatagcacttgtttttaaccgattgaaaatcagcgaagcaataaaagtcgcaataaacgccccaataacaataactagaaattgtgctaaatcgccaaaccttctttgcgtaccaacattggtcaatgtctgtaccatatatgcaaaaatgatttgttgtgtactagcaatcaagcctaaaatagttaacataatgaattttgcatgtgaagaatatttgtaaatcattttttgtcctcctgtattttacttgaggctagtatcgcaggataatgacgaaaaatgttagaaatttacagatctgcaaatcgaggtaaaacattatgttcaaatatggttcaatttacaaacaattgcgcaaagatcaagaaatcactcaaactgaagcctgcaagggtatttgttcaatctctaagttatcacgctgggaaaataatcaggtagaagttgagtttagcaccgccattgcattactcaggcgcatcaacattacgcttgacgaattcacgcattacgctgcaatgaaaacagaatttacattgccagacgacattataacggccattaaagacaatgatacaaaggtactcgaaaaatttgttcaggagcagctaaatcattatcacgccaacaaaaatattctcgaactcaaaaacatcattcttgtctgcaatcaattatttctcatgactggtaaaaactatctaacacctgcagacattaatcgaatcggttcatacctgcttcacaacaccgtttggtctaaatacaatatcttgctttttgctaactcaccgtttttgctaaattctaaaatcggctatcaaattgctctgcgaattattcacaattttcaccctacagaaagtttaaacgaaaatactactattttcatgggcggtttatctgatacagttattgccttagttttcaaaaagaagctagattacgctcaaaaaattcttaatgaattaaaaaagataggacttcccttctatctcatgttctttagttcaacattgacccttttacaaaaaattatcgactactgccacactctcaacgcacagcctgtattggcaatgattgatgccatagttcagctaaattgcatggaagttgctaaaaaatggcttgagatttttaaagacgtacaacaaatctggccagaaaaagaaaattaaaaaccgtaaaagtaatttactttcacggcttttgacatggtattcattatgcaagcttacaaatttttagcttttaattaatccttaacaacgtctttggtgttcaaccattgactcttgttgatcttaacgatcttcttgccagcagctttcttaacatccttagcggtgtaagttgaacccattgaaaccttttggctagtcttgtgaccttgtgcgtccaaaacattaactttttggttcttagtgtcctttacagcaacaaagatcttgtcaccctttttaattgcaggatcagttggcatagtttcggcaacacctaactttggagcagtaaaactagctgcttgactaactgaagcaccaacacccattaaactcattgaagcaactgcgattgaaacaactttaactaaattctttgaaactaacataatgaatacctctaatttctatatcacttaatttgttggaactttttgttccctcattccttacgtctttattgtataacatatgttattaattacaaggggtttatcgaattttttaaaaataattcagtcgtctcaaagtattgctataataacgattgcggggattttttgtccaaaagcattaaaaaagtgtctgagaaaccgttctttcccaaacacttttttaagcagctgctacttcgtttgaattttgagtcacttttctagtttttaaactgacaaaaatcgctacaattagtgttattacctggattactaataatgtaaccaaagcaacagtaacattgaatgaaccagaaattgtggttaatactgttgtcataattggagcaacagccattaagattgtatttaataagccaacagttgaagccaagattttatgatcaactgatgttactagccattgctccattttaactgaagcaactcctgcaatagctgccaagaaaaacattgttatcataattacgtaagtatttcctaggaaaatgcttgttgtagtaacaatacttaaactggcagaaataattactaaactaaaaactgttaattttttgaataattgtggtccaaacattgaacccaatgcaaagcctgcgccaataaccacaccaaacaaagcaatagtaaagctataagtgccgattagcatagttgaacgatgagctgcaagtacaattgttgtcaatggagtaattgtatctaaagctccatttaataatgcgattactaataccacagtcaataatcctgattgtttcttcacttgggtcaatgaagttttcattgtttggaaaaagttttgatcattaacttcctttttttcaagtggcttctgatccttctgatgttttaagccaacactggcaaataacaaacctgctaacaagaaagtacctgcattaacaaaggctaaagttgagtatgacattactagcaaaagtgctgaaccaatgaattgagcacccatactaataatttgatttacgccgccattaaagcctactgcattcccgtattcttttttaccaacaatatcaacaattaatggtgcaaccaagccacctgaatatgaaccaatagtatctgataagaaattcacaacaacgatgattaaaaccaaattccactgtgacattttagtgataaacaataatcctactaaaccatataagataaatcggacaaatgctgctaaaaagatattgcgaaactttttcttagtcttatcagcaaggtaaccaccaaagatctcgaataattttggaactgattcagaaattgcaattaatgaaagtgctaatgagtagttttgtaatttgctagcataagtcatgaaagccaagtagaaaagaatatcgcctgcgcctgaaagaaaactagctactgaaaatcttctaaagtctgcgtttttaagaaatacgttcataaatcttacccctttttctttgtttcgtttgttgttgaaattataataaagtgaaaaagaaattaattttaaaaatggcgtattcgacattcggaggataaacctatgacaattggtgaattactcaaagaaaaaagactagcagaaaacaaaactcaaaaagcatgggttggtcatattatcagtacttcttattatgctaaagttgaaaagaatattcatagaattacagcagaggatttattagccattcttaaacataatgatctttcaattactgactttttcgaagaattagcagacaaaaaggatgaactaaaagcacaagtaaactcgctaaataaaacagtaattgatgctgtttgtcattctgatgtttccaaagttaatgaagtcattcaaattattaaaaaaatggatctaccgactaagcaaaaacaagaacttatcttaatcaataaggggtttatcgaaactatcaaaaatgatctaagtgacaattatcagccagataaaaacatcgttcaacaactaaaagacaaaatttttagtattcctaattttaatagattcaaacttgaactctatactaatttcatgcaattttatgattatacaactaatattatgatcaccaaacaagtgatccataaaatagatcagtttaagagcgataaagagttattagcaatcgctggtattctattcaatctcctttcacaattagtcgaagaacatcattatcaagaaactgcaccatttatagcagctagtgagcatttaccctttttaccagacttatactttcctcaaaccggaatctcattgctaaaataccttattagttatcattttaataaaaaaacagcagacttagctaaagctgagatgattgcacaaacttatcaaattactggtctagaagacttgggtaaaggtgcacaagaaattattaatgaagttaaagaggactagctttaagctaatcctcttgtttcaatctctaaataaaacctaacgcgttatagcacatgtgcaccaaaattgaatagcgcaaatctttggttgacatatagacccaagctaaaaccatgcctaagacccaatatactaagatatacttacttaatgccggatcatgcatatagccaaataaaaatccgcttgcaacaatacctagccacttatttctagtatttttcttagtgaaaaagatattgaaaaacatccctctaaagatatgttcctcacaaaatggcgcgatgaaaactactaggatcctaaataaacctgcattgtattccgctattttattcaagctttcctggttctttgaaacgccgccaccaactagattaagcatcacaatcgaacctactacaatcagtacaaaaccgatcatcgctattccgattctgcgccagtcccagtgtggtgtttcatcaaagccccaatcattttcttcttttaattgcctgcgataaatataggaaattgcaaacaaaactattaccgtagcaagcgccgtaacgaagacgcgatattgcgccaaatcaaatcgctgaggtctaaagtaaagtacttctaattcagaatacattaccaaagccaacacagcccctgcaatatttcccaggtaatgtccaaatctcttcatttttcattcacaccttgattctttcaactagtaatcattgtttctattataatgtaaataagaaaaaatacctaaggaggagtatctatctatgcttaatcagatcatcgcttttttggggagacgcggtgagttcttctacatttcagtctttatgttactgatattttttgcctttttaatctcttggcttatcgaaccaagacgtttgattaatggcgttttgtttactatctttatagtctcaatgctctcttggatcaccgttatggtgcacaaaagtacgagtcacggcttgcaacgtgcctatgacctactagttctagctgcattatttggcattgtcttattattaattttcgcctggatttttctattctggaatgcctatttcgtttggaaatatgaaagccatactttgcctaacttgcttactttaattaccggatttttagcattaattattagtattatcgtgctcttaggaccaggtaagtacttgccacgttggcttagtctcgcattagcttcaattcccgcgattgcaatttatttgggattggtgctttacaactttttggtaaacttgcttctatatcaaatttatcctcgtacctaccaccaagactatttaatcgttctagggtctgggctaatcaatggcgaccaagtatcaaaactgcttgcggctagaattaatcgggcaattcaatactctaaccgccagtatccaaagggccgcaagcgccctatcctgatcatgtcaggtggtcaaggcgctgacgaaaaaatctctgaagcactcgctatgtctcgttttgcacaacggcgtggcgttagtgttgaccgtatcttattagaagatcaatcgaaaaacacatacgaaaacatgctcttttctaagcgtattgccacaaaagattttggtaattcccacttcagggcacgcttctttagcaataattaccatatttttagagctgctctcttggctaaggaagttggtttaaaagccaatggtgtcggtgcttacaccagattctactacttgcctaacgcaattatccgcgaatttgccggtgtgtttgtcatgcataaacgccgtcatttcgttatcatgggattaatcgttttattctttatcctgcaagctatcttagtcatgacaggattataaagatttactgtaatttagaaaagagggatgcaatgcttcaactaaagcatatttttaagtcatataaggtgggggacaacatcacccacgctttagacgacgttacaatctcgttccgtgaccaggaattcgtcgctatcttaggtcctagtggttctggaaaaactaccatgttaaacgtaattggcggacttgaccgttacgaccaaggtgacttgatcatcaacggcaaatctaccaagaattttaaagagaccgactgggatgcttaccgcaacaataccgttggttttgtttttcaaaattataatctaatcccccacttgtcgatcatcgccaatgtggaactagggatgaatttgtctggtgtgcctaaaaaacagcgccatgaaaaagcaattgcggcgttaacagaagtgggattgaaagaccatctaaataaacgtcctaaccagttgtctggcggtcagatgcaacgagtagcgattgcgcgagcaattgccaacgaccctgatattctactttgtgatgaaccaactggtgcacttgatactgagacttctgtccaaattatgaagttgatcaaaaaactatctaaagatcgactcgttattatggtgacccacaatcctgaattagctaaagaatacgccacaagaatcgttaatttccaagacggtaagattcgtcatgattctgatccttttagccctaataaggaagaagacaaatttaacctcaagcgtaccaagatgtcttactggaacgccatcaagttgagtttcaccaatattatgacaaaaaaaggtcgaactctgctaactgcttttgcttcaagcatcgggattatctcaattgccgtagttttagctatctctaatggttttcaaaagcaaatcaataccacaatgagcaaagctttagcaaaatatccgatttctatttcacagaccgcaactgacattacttcagctaatgcacgtaaagaatcggataaaaatgtcaaaaaccgcggctatgtaacggcagaacaagaccaaagcgaacaggcccaacacgttaataaaattagcacaaagtatgttaactacatcaagaagatcaatcctaattatgccaataacgtgtcttaccaacgcggcgtaagcttgaatttattagctaaaaacaagggaaaaattgaacgcgtgcaattttcaaatacggatcctgatcagactaattctgttctagctgctagatcccaagcgatgagttcaatgggactgggttcaagtgtctttcccactactttaaataaagagaaagactcatttttgaagcaaaactatcaattgctctcaggcacttggcctactaaggcaaccgacttggttttagttactgacaataaaaatactgttaacatcaatgccttaaaaaatcttggtttcgatttaaagaataaggaacacgtcaaattcggccaattagtaaataagcaatttcgtgtagttgctaacaatgattactatcagcaattgccaactggcatgtttattcctaaaaaggtaaataacgccatgtataacggtgctcaaaccaagctaaagattgctggtgtcattcgtcctaaaaacgaagattcaatggccttgttatcaactggaattgcttatagcgatcaactttcacaacgcgtgattaatgaaaataaaaactctgcaattgtaaaggcacaaaagaagagtaaccatagcgtattaactaaccaaaaactaaatgccaatgaaaagaaagctacaatgcagactcttggcggtaccagcatccctactggtatcatgatttatcccaacaattttgatgataaagataaagtacttgattatcttgacaaatggaacaaggggaagaaaaaatcagacaagattctctatactgacatgtcaaacgctgttaccacaatgactggcggcctcttaagcgggataacgaccatccttgtcgcatttgctggtatttcattaatcacatctatgattatgattggtattttaacttatacctcagtacttgagcgaactaaagaaatcggggtactcaaggcattaggtgcccgtaaaaaagacattactcgtgtctttgatgccgaaaccttcatcctaggtgttttctctggtgtattaggcattctgattgcttacctactaacattcccaattaacagtatcatttacaagattactgatctggcaaatgtagcccaactagatcctactgctgctattgttttgatcattatttcaactatcctcaccctcttaggtggtcatattccagcacgaatggctgcaaagaaagatgctgcaattgcattgcggagtgaatgaatttaataaagaatttgttacgttgttcacaataacctaaatttttagcaaaatatgtggtatcttagctttagcaaaaacaagtaagaaaggaacttttttcaccatgactgttaaaaaattagaaaataacagcgatgttaatgtagtggcagaagaaagcaaagttttaactgatttattgaatgaatcaactaagcaagtaatcggtcaagcagctttcgataagatccaaaacttaattaaaatctctgccgccaaagattatcaagaacttgaaaagcaaattgctagtcttaacaatcgcgaaatgattgttgttgcacgttattttgctactctcccactcttgatcaacatttcagaggatgtagaactagcaagtaaagttaatgtgcttaacaatactcatcaagattatctaggtaaattgagtgacacaattgacattgtagcccaaaagaaaaatgccgaagaaatccttgaacatgtaaatgtagtacccgttttaactgcccatcctactcaggtacaaagaaaaaccattttggaattaaccgatcaaattcatcaacttttgcgcaattatcgtgatgtgaagaatggcacaattgatcgcgatgaatggactgaacaaatgcgggcttgcattgaaattttgatgcaaactgacattattcgtggtcacaaattaaaggtagctaatgaaattaccaatgttttggcttactaccctaaggctttaatccctgcaatcaccaaatttactagtcgttacaaggaattagctaaaaaacacgggctaaacgctagtcatgctacgccaattaccatgggaatgtggatcggcggcgaccgtgacggtaacccttatgtaacggctgatacgctagaactaagcgctactttgcaaagccaagtaatctttgaatattacattaagcaaatcaataagctttatagagccatttccatgtctacttcttatatggagccatctgacgatgtaatgcacctatctgagctttctaatgatgattcaccattcagaactaacgagccatatagacgggcattctactatattcaaagccgtttagtgcacactgaacaaaaattactgaatattactaacaagaacactttcttaaagaaacgtgacctccaaaatcttgataaaatcccttgttatcaaaatgctcaagaatttaaagccgacttagaaatcatcaaaaattcacttgaagaagaccatgatcacgccgtagtagacagctactttactcaaattcttgaggctatcaacatcttcggcttccatctagctacaattgatatgcgtcaagattctagcgttaacgaggcctgtgtcgctgagctacttaagagtgctggaatttgtgacaattatagcgatttaagcgaagacaaaaagatcaagcttttactcaacgaattgaacaatgatccacgtaacttacacgccaataacaaacccaagtctgagttactacaaaaagaattaaagatctacaagactgctcgtcaattgaaagaccgtttgggtgaagacgtcatcaagcaacatattatttctcacactgagagtgtttcagacatgctagaacaagcaatcatgttaaaggaatacgatttacttgataatcaaaaagcccgaattcaagtggtaccactatttgaaacggttgaagacttgaataatgcccgggaaataattaaggaattcttaagctttgatatcgtcaagaagtggcttgtttctcaaaataattatcaagaagttatgttaggctactcagattccaataaggacggtggctacttagcttcatgctggaacctttataaagctcaaaaggatctaactaagattggtgaagaaatgggtatcaagattacctttatgcatggccgtggcggtaccgttggtcgtggtggtggtccatcatacgaagcaattacagcacagccattcaagtcaattaacgatcggatgcggatgaccgagcaaggtgaaattatccaaaacaagtatggtaataaagacaccgcctactacaacctagaaatgttagcttcagcaacaatcgatcgaatggcttctaagcaaattgttagcgaagatcatgtcgcagatttccgttcttcaatggatcaaatcgtagctaaaagcaacgaagtttaccggaaactagtatttgagaatcctaacttccttaagtacttcttccaagcaactccaatcaaagaaatctctggtcttaacgtaggttcacgtccagcttcaagaaagaaactcactgacttttctggcttaagagccatcccttgggttttctcttggtcacaaagccgtgtaatgttccctggttggtatggcgtaggttctggtttcaagtcatttatcgatgctgatccagccaacttgaaggaattacaaaatatgtaccaaggttggccattcttccactccctgctttccaatgttgatatggttttatctaaatcaaatatgagaattgccaagcagtatgcggatctttgcgaagatgaacaagttaaatcagtctttgatatcatcaatcaagaatgggaactaactaagaaagtcatcctacaaattgaaggtcatgatgaattaatcgaagatgcacctactcttaagaagagtctggaatacagaatgccttacttcaacattttgaactacatccaattagaaatgatcaagcgtgatcgtgaagatgagattcaaggtgtttaccaaagtattattccaattactatcaacggtgtggcttccggtttacgtaattcaggataaaaaacacataaaattcagctaaaaaaggctcctcattgcctgttttatcaagcatttgaggagcttttttttaatttattaaactttttagttacgcctttttcataactaagttaagtggcgttacaattactggaacgacaatggctgtaaaaattgcttctactaaaccgttcatgcccagtgccataattaaaattaaaatcaatggcgtacctgaactataatttcctaggtaatgagttaagcttgctggatcatgcatgaagaaaatactcgtcagcaaaataaccatcacggtattagttaacgaagtgactgctccacttatgatataacccaatttcgcatatttagtcttactcatacccttcgcaataattcccgggaaatagccagccaaaatacttggtaccaatgaaattaccggattttggaacaacattaagctgaccatatcgccaggttgagtatatgcaacaatcaatctggtaataccccagaataagccaaagcctagacccgccttttgtcccattaacgtgccatagacggcaattgtcattggaatagtagttacagctggcaaagccgggataattcttacatagccaacatttggcacaaaagtctgtacaatcaataaagcagcaaagacagcagtaattgctaatcttttagtttcttctcttctcatatatttctccaacttaattctttagactcaattaaaccataattaagattttttctcagcaaaaaagtttattatacaatatctaggtatattttatctaatatgacaagatattgtattttttattatttttttacttaattatgcattatccttactctctctaatgcataatcgtgttctataccaattaagaatccctttatatcaatactttatgttgtatgtcaattttgacatagccactaaatattgttaatctcgttttgtgttaaaaatcatttgatggagagaggatcaattttatgaataaaaaagtcaaaaaattactatctattggtgtgcttgcattgagtttaggtgcaattttaaccgcctgctctggtaaaaaacagggtgcaagcaataataaatcaagcgatgccaagcactctattgcattaattgctgacggtaatggtgtaaatgataactcttttaaccaatctgcttgggaaggatttcaaagttatggcaaagagcacaacttgagccgcggtcgaaacggttatcaatattttcaatcaagtagtgctgctgatttcactcctaattttgatcaggcagctaaagctggttatcaaactatctttggcgttggttacagtttaaaagatgccgtagcttctgccgccaaacgctatcctaaaaagaattttgccattattgacgatgtaatcaaaggacaaaagaatgttgtctcagctaatttcaagagcgaacaagcttcctacttggctggtgtcgtagctgctaaagaaaccaaaaccaacacggttggcttcatcggcggtgctcatggcgatattgtcgacctttttgatgccggatttactcaaggtgttaaagatcaagccaaaaaaatgcacaaaaaagttactatcttaaaccaatatattggcaactttactagttcagacaaggccaaatcaattgctcaatcaatgtacaccaaaaaagccgacatcatcttccatgctgctggtggtgctggtgatggtcttttccaagaagctaaagccattaatcaaactagaccagctaaagataaagtgtgggtaatcggagttgatgtcgatcaatctcatctcggtaactacactgctaaaggcggacaaaaatctaattttgttttgacatcagtaataactggagtaaatgttgctgttaaagatatcgccaatagagcttataataataaattccctggtggtaaaaatttagtttatgggcttaaaaacaatggtgtttctattgaacgaggacagatttcagcttcaacttggaaagatgcccaaattgctagagctaatatcctaaaaggcaaaattaaggttgccattcatcctaacaataaataaaagcatactagtatagtttgctttttataattacaatcaattattttttgcctgatcaatatttttgttgacaaaataccaaacaattaataaacttatttataaattgttcggtattaatattgtggaggacagaaataatgaacgtaaagttcaagaaaattttatcatttggtgtcgttttagcatcagttggcttgattctaactgcttgttcgggtaaaaagtctggtcaatcagccaacaaagatactaaacatggcattgccctaatcacagatgaaaatggtgttgatgatcattcatttaaccaagctgcatggtcaggatttaaagcatacggcaaggaacatggtttaaaacaaggaaaaggtggttatcaatacttccagtctagcagtgccgcagacttcactcctaactttgatcaagccgctacagccggctaccaaaccattttcggtgttggctatcaattagccgacgcagtcaagcaagcagccaagaagaatcctaaaaagaatttcgttatcattgatagcgttgactctgggattaagaacgtcgcttctgcaacctttgaaagcaatcaagcttcttatcttggcggattggccgcagcttacaccactaaaaccaacaaagtaggtttcattggcggtgctaagtcatctattattgatttattcgaagccggttttaagcaaggtgttgctgacggtgctaaagctcttcacaagaagatttcagttcaaacccaatacatcggtaacttcacttcaaccgataaggctaaatcaatcgctcaatcaatgtatgctaaccgcgctgatattatttaccaagcagccggtaacgcaggtaacggtgttttccaagaaggaaaagattacaaccaagcccgtccagcagctaaaaaggtttgggtaatcggagttgacgttgaccaatctaacctaggtaactacaagtcaaaagatggtaagaaagagaacttcactttaacttccgtcttaaagggcttagatgttgctactaagtcaattgctaatgatgcttacaatggtaaattccctggtggtaagcacttagtttacagcttaaagggtaatggggtttaaatcaccaaaggtaatttaaacgctaaaacttgggcagcagtacaaaaggctcgtcaacaaattattgatggcaagatcaaggttgctactgctccaactaagtaattcagctgcttagtattttgagaactcttcgttttttagcgaagagtttttctatagttaattaaggaagtatttatttacatgaaagaacagagaaataaagtaatcgagatgcgtcatattgtcaaagatttcgatggtttcaaggcaaatgacgatattaaccttacgctctatcaaggtgaaattttcgctttgcttggtgaaaatggcgcgggtaaatctaccttaatgagaattttatccggcttgcttgaaccaacaagcggtgaaattctggttaataatcaaaaagtaaatattaaagatccaaccgtcgctaaaaagttaggcattgggatggtacaccagcacttcatgcttatggattcatttaccgttttagaaaatattattctaggacatgaatcaactaagggacccgttatcgatctgaaaaaggcaagaaaacaggtcctagctcttgcacaaaaatatggctttgctattaatccagatgccaaaatctctagcattactgtcgcccaacagcaaagagttgaaattctaaaggtactttatcgtggtgcagatattttaatttttgatgaaccaactgctgttttaaccccacaagaaatttctgaatttattaaagtactcaaaaatttagctaaagaaggcaaatcaatcattttgatcactcataaattagaagaaatcaaggctgttgcagatcgagttacagttatcagacgtggtcacgatgttggtacttttgctgttgatcaagttagtgatgaacgattagccgaattaatggtggggcggcatgtcaacatgaaactaaccaaaccagcacctaacttgggtaagcaaattttggcaattaaaaacttacaggtaaaaggaaatcacggtgccttaagcgttaaagacctttccctttcaattcgtggaggcgaaattttagggctagccggaattgacggcaatggacaagatgaactggttgaagcaatcactggtttacgccatgttaagtcagggcaaattttaattaatggtcaaaatttaaccaaccaaaaagttcgcaaaatcaccgaagctggcgtagcgcatattcctgcagaccggcaaaaatatggcttaattcttcacatgtcattagctgataacttagcgctgcaaacttactaccaacgtcccttctctaatcatggcatcattaatcatcaagcaattttgaagcatgccgtagatttaattaaaaaattcgatattcgaactactagccctgcattgccagctagcgacttatcgggaggcaaccagcaaaaagcaattatcgctagagaattaaatagaaacagcgatctaatcattgcattccagcccactcgcggtttagatgttggtgcaattgagtatattcataagcagcttttagctcaaagagcagcaggaaaagctatcctattaatttcatatgaacttgatgaaattatgcaattatctgaccggattgctgttttgcatgatggtcaaatttcaggcgaagtattacctgaaaaaactacagatcaagaactaggtcttttaatgaccggtgttaagaaagaagatgcaacaattgattaaagttacacctaaagtcaaaaatattctagtaccagttatctcagtaattgctggttttatagttggtgcaattatcatgctgatttggagttataatccttttcaagcatacagctccatgttctctagcgcactgggcaatatgaatggtattggtgaaactattcgtgaagctacgccattaatttttattgctatcggttttgcaattgcctcaaaagctggcttttttaacatcggtttgccaggtcaagcacaagctggttggttgacttctatttggattgtattggccaatcctcaattgcctaagccagtattattgcctttagctattattgcaggcgctatagctggtgctattgtggcaggaattgctggctatttaagagctcaatttggaactaatgaagtaattactactatcatgcttaactatattgtgctctatacttgtcaatatttaatgcaacaagtaatgtcctcaaaattaagaattgataccgatactaccaaaacaattccagccaatggcagcttaaagcttaactggttaactagcatgtttggtgattcgcgaatcaatgctggtattttcttagcaataattggacttattttttattggtatttaatgaaaaaaactaccgttggttttgaaatcaaggcagttggactcaatccttttgctagtcgctatgccgggatgtcttctaaaaagaatattattatttcaatgttactttcaggtgcattttctggcttaggcggtgtagtacaaggacttggtacctaccaaaactacttcactcaaacaactagtttggatattggctgggacgggctttcagttgccttacttggtggtggaactgcaattggtattttattagcttcacttcttttctcaattttaaaaattggtggtttgggcatgcaaactattgccggtattccttatgaaatcgtatctatcgtaattgctgccatcattttcttcatcgctatcaattatgtcattggtttgctttttaaaactaagaagaaccgcagtgattactacattccaaccagaaaagaaaaaggacccaacaatggtgttgatggtccaggtagaaaagtaatcgaaggagaaaaataatgaatttcgttacaatgatggcgttaattgtttcatccactttagtttattctgcgcctctaatcctagcttctcttggtggtgtttacagtgaaaactctgggattgttaatattggcctggagggtatcatgaccatgggagcctttgcggcgattgtcttcaacctaactttcgcttcaacttttggtgcagctactccttggcttggcactctagtcggcggaattgttggtttgattttttcattgcttcacgctgttgccacaatcaattttcacgctgatcatgtcatttccggaacagtgctgaacatcatggcaccacctttgggtgttttcttgatcaaggcaatttatgataaaggccaaactgaaaatatcaccgctaacttcggctacttcagctttcctggtttaagcagcattcccatcgttgggccaatcttcttcaaaaacacctctgcccctgcttggattgccattattcttgctattttgatgtggtggattttatataagactcgctttggcctacgcttacgttcatgtggtgaaaatcctcaagcagctgacacaatgggaatcaatgtctatggcatgcgttatgcaggtgtattaatttccggctttatggcaggtcttggcggtgccgtctttgctcaagcaatatctggtaacttctctgtttctactatcgttggacaaggattcatggctttagctgccgttatatttggtaaatggaatccaatcggtgcaatgctctcatcccttttctttggttttgctcaaagcttaagtattattggacatcaactgccaggaatcgatcaaattccatccgtttacatgcagattgcaccttacgttattacaatcatcgttttggtcctcttcctcggcaagtcagttgcacctgccgcagatggggttaactacatcaaatcgaaataagaaaaaaaggttgtttcacatgaaacagccttttttttacacatgtccacatagttatccacaagatatagtgattatatgtggcaatcttactatatcttgtactaaataacagccaacggcgttttatcagttggcattggaaaatcactgttaagcaatctaagctcatcatctgtaagtttaatcttttgtgttgcaatattttccttcatgtgttctacactacttgccttaggaatcgttaaaacattgccattgcgcatcgtccaagctagcattatctgatgaggcgtaacgccatgatcacgtgcaacaattttcaaattacgcgtaattcgaattgtgttgcccttgcctgaattaaatggtgaatacccaataaagtttacaccgtgctcttcttgccaagcttgcagatcaaattctgtcccacgttcactgatattgtataagtcttcattagcaaagcattcttctccacctggcactgtaaaaagctcctacatatcagccgtatcaaagttagatacaccccaataacggatcaagccatctttttgtaatgcttgtaagccgcggatcgtatcagacaagcgatgactgccccgccagtgtaatagataaagatccagatgatctgttccaagacgttttagactggcttctagactctgacgttctagttttggcgttgcatgataggggtagaattttgaaatcaaaaataatttttcgcgatcatatcctttaatcgcttcaccaattagctcttcgctttggtcatccccatacatttcggctgtatcaaatacactcaagccatgatcaaggccatagcgaatagctgctatttcatcttttttctttttaggatcttcacccaaaccccagctaccaattcctaaacctgttagtttttcaaaattcatcctcgttcacttccttatgttcaaattttaacataattgattcgtaattatttttatcaatcaattgacaaaatggtctattccattttataatggactagaccagcaaatgaggaggacttaattatgaaagttattgttaccgaaaataaaattcaaggtggagcaaaagcatttgaaatttttgaaaaaggaatcaagaacggtgctaaagtcttaggtttggcaaccggctcaacccctgaaacactttaccaaaactgggtaaaaagcgatcttaactgtgaaaatcttaccagcattaacctcgatgaatacgttggtttaaccccagataatcctcaaagctaccactacttcatgcaaaagcatttatttgacaagaagccatttaagaagacttacgttcctgacggtatggcaaaagacgttgatgctttttgtaaagaatatgatcaaattatcaaagacaatcctatcgacattcaactattaggaatcggccgcaatggtcacattgcctttaacgaaccaggcactccattcaacatcggcactcatgaagttaagttaaccgaaaatactatcaaggctaatgctcgcttctttgacagtatcgatgaagtgccaaagagtgccatctgcatgggtactgctaatattatgcaatctaagaagattgttttgatggcttttggtgaaaagaaagctcacgcaatcaagaaaatgattgaaggcaaagtcactgaagaagtacctgcatcaattttgcaaaaacacccagatgtaacggtgatcgtagacgaggctgccgcacaagaattagacgacaaatacaagaactaaaaacaataatttaattatcagcatagaaaaagctaggctttctacaatcgtggaagacctagtttttttatttagcagcctgtatctacaatgaaatatacttcacaaaattgcatttttatataaaaaatgaagcataattcagttttttattgaattatgtttcattcctattcgattttttatttctacccttgacttttagatgtgaaacataatcaaaaaatcacttgtgtgccacaacatatcgtattaaacttaataattgtctacatatggtatttaagaaagaatgtgattcaagttattgttttaagtgggccaattggagccggtaaatccagtttaaccagtattctagctgaacatttagggactcaggcattctatgagggcgttgataacaatcccgtattgcctttatactacaaggacatgaagcgttacacttttttgcttaacacttacctccttaaccaccgtttagcacagatcaatcaagcaattcaagaaaaaaacagtgtctccgatcgttctatctatgaagatgcactgttcttcaagatgaacgccgatagcaaggtcgctgatccaaccgagttcaagatctacgatgacttactcgacaacatgatggaagacactcctggcaatccaagtaagaagcctgacttactgatttacattcatgtctcccttgatactatgcttaaccgaatcaagaagcgcggtcgttcatttgagcaaatcagcactgatccaggtttgaaagattattacgcaagacttttaaagtactacgaaccatggtatgaaaattatcatgcctcaccaaagatagaaatcaatggcgacaaacttgattttgttaccaacatggatgcacaaaaagaagtacttaaagaaattgatgaaaagttgcatgaaatcggcaacttataagaaaaagaaggaacgtgatgacagttattgttttaagcgggccaattggagccggtaaatccagtttaacaggtattttatctaaatatttagggactaagcctttctatgaaagtgttgatgacaatccagttttgccacttttttacgctgaccctaaaaaatatgcattcttattgcaagtatatttcttgaacacacgcttccacagcattaaagacgcgctcactgaagataataacgtcttagatcgttctatctatgaagacgccttattcttccaaatgaacgctgatatcggccgtgctacttctgaagaagtcgatacttactatgagttattgcacaatatgatgggcgagttagaacggatgccaaagaagaatcctgatttgctggttcatattaatgtttcatatgatacgatgatcaaacgaattcaaaaacgtggtcgtccctatgaacagttaagttatgattcaactttagaggactattacaagcgtctgcttcgttattacaagccttggtatgagaactacgattactcacctaaaatggaaattgacggtgataaattagacttcatggctaatccagatgataaagaaaaagttttggatcaaattacagccaaactaaaagagatgggcaaattacctgaagattgggaaaagcctaccgatattcaaattgaagcataataaaaaccattcatttgcgaaattatcgtatttgaatgattttttgtttacagtgaatttttcgctttatttttgtataatttgaaaaaatgtgtttaaaggaggagtttgaaaatgatgttaaccgtaactggtggacaatggtttttcccacttgtcataatttgtctaattttgggtattgtcgcaaccatcgctcaaaagaaaaagctgactaaactaaaaagaataaccgataactttgcctatgcaatattagttattctcttaatcattgaatggattctatattttcaaaaacaatttaattttattactccagcaatctacacccttgttgtcatctatcttattggacggcaattactaatcagataccgttcttctctattgaaaaaattaggggctaaatataagcaactgacaattggacttgctactatttacattattttagttaccttattgcttttaatcggatctaaattttcaactatgggctggatcattgctggattagttatcgtagcctttggcttcgttagctacatctttgaaaaagacaaacaataatttcccaggaaataataaatcgcatagagcttctatgcgatttttatttattcaatttttgctaatgccttcgcaaccccatcatgattgttatcagcagtaatttgttccggagcaaatttttgttttagttctgctggggcattacccattaaaaatggataccccacttcttccaacatatcttcatcgttatagttatcgccaaaagcaatgcaattttgcaagtctacgccatattcttgagcaactattttgactgcactagccttgcttacaccctttaaaacaatttctaataaattctctgctgatctaacaaaagtcaaatcaggatatttagcagttaattcttcttgcatacgatcaagatccgctgaatctcccataattagacctttatgcacgccctgcagtttttcaagttgattaattgtagtcggtgttgcttttacatcgacaattctttcttcatttttaacccgtgggctcttttcttcactacaacaccaaacatagccactatagatattccaagctgcatcattatcttgctcatcaaggtagcggcaaatttcagctgcttcttttgcattaaaaaaacggctgattagtactttgcctgtttcatcaagggctaaagcaccgttatacgcgataaacggacaaactttcaaaatttgattaaccactgtcatcatccctttaggaagacgtgctgatgcaggaacgaaaatattaccattaataatttgtctacgaattgcatcccgcgttgcggcggttacctttaaatcatcattaattaatgtgccatcaagatctgaaaaaataagttgtgcggacattctttcacctttatttcttttttaattcttatatcctaggataatgctttatttatgctaatgaaagctgattcaattaaatgcttttcctatcatttaaagataaattgcaataaatgcccaagtaatcattaaaataattcgcgtttacaaatttatttatcaatgctaaagtataagagttgtgttcaataagttaaaacacgaacaatattttggggagataaaatgaattttataaaaagctactttcaattagataagtacaaaaccaacattcgaactgaatttattgctggtttaactacctttatcagcatgtcctatattttgtttgttaaccctagcgtactgggcgccagcggtatgaataccggtgcagtcttcaccgctactgctttagctgccgctcttggtactgcaatcatggggatcgttgccaactacccgatcggtgaggcaccagctttgggaatcaatgccttctttgcttacaccgtatgtattgggatgcatgtttcatgggaaacagccttggcttcagttttcgttgcatcaattattttcatcttaattactttattcaaattaagagaaaagatcattgattcaattccagctgacttaaagtttgccatttcttctgggatcggcttattcattgcctttttaggtttacaaaatggtaaattgatcgttgctaataaatcaactttggtaggtttaggatcattacacgatcccctcgtttggatcactatctttggtttgctagtaactgtcattttgatgatcttgaacgttcctggtgcaatctttatcggaatggttcttgccgctatcttcgggatctgcactgggcaaattgcattgccacacaaggtgatttctaccgcacctagcttagctccaacctttggtcaagctattttccacgtaaaggacatcaactctgtgcaaatgtgggttgttgtcttaacattcctgcttgttactttcttcgatactgcaggtaccttaatcggacttgctcaacaagctggtttcatgaagaacaacaagatgccacgtgtaggtaaggccttagcagctgactcaagtgcgatggctgttggttcaatccttggtacttcacctgttggtgccttcgttgaatcaagtgctggtatcgccgttggtggccgtaccggtttaaccgcagtttttgtagcgatctttttcttaatctcaatgattttcagtccattgcttggtgttttcactagccaagttactgctcctgccttaatcattgttggagtattaatggcacaaaatactgctcatattcattggaacaagttggaaattgcagttcctgcattcttgattattttagggatgcctcttacttactcaatttcagacggtttatcatggggcatgatcacctaccctatctgtatgcttgctgctaagcgtggcaaggaagtcacaccgatgatgtgggtactgtttgtagtattcctgatcttcctgtgggtactgaacttttagatgaaaaagaatagataaagaaaaggactaagttcgaatttgaacttggtcctttttgtgtattcactaacattactttttattcttatcgattataatcgataaaaacgtcaaaatcaccaatcttatcgagtataatcgataagatcgcaaaaaaagagtcttttatcgactatactcgataaaggctcttttttatattacccaggaaatattaacgtacagtttctaaacaatatgattttttataataaaatgcgtcataacaggcgaattttaattggctttaaaatttcttttttctaaaaacaagatagcctaaaagggtaaaaagaactatatagcacaatgtaccaattaataattgtggattagagagatgggaggttaagtgataagttgcataattataatactgtgtcgttaaattgagcatattcaaaggattccaacgaataatatcaagcggtccaatattataatttaataaattagatgatagactgcttcccataaagataataattgcatttatcataataactacggtgtttgaattaatcatacaagacattaagcaaataaggctgattattaacgtagaggttataatatcaacgcctgttgttgaaagcatatttataaataatgactgattatacttataagtcgcagtccaaggaactatttttgctataagtggaacagtgttaaagaagatagttacaatcatagctatggcatgtagaaaaagattataaataaaaattgtaatgaactttgcaagatatactgttcctttattttgagcatgatatagtaatgtcaaaatcgttttgttttggaactccattgagaaaatagttgaacctactatgaccaaaatcaacataattatttggctagagttataacaagtcataactaacaaattgccatattgttttcccatggccaatcccataaaaatcataaaaagaatcataaaactgataatccaccaaggcagcttacggtgacctaacttatagaattcttgttttaattccgcacgcataaaagatcacctccgcctaaatagaccgctttttaaacagtaaagcgccaatccaaaagaaaactacagcgtacactaaattagcaataattaattctgaattagtcaaatgtgttacagtaaccatctcattattcgatagttgcgtaatgatattaatcatatttaatggattccaggctaaaattgatttcaaaccaggaaaagccgacattgctaaatttgaaagatccgaaccaagaaatccgattgctagtccgattatgatcactgttgcattattcctaatcaacaaaataagcattaaagagagggcaacgataaatattaaataaatcatcgttcctcccatatttaggaatagcgcattgattaagggatgtccatgataatcatcatgccaagaaaatttcgaaccaaccatcaaggtcttgagaataaacgaaaagattatcccaaataccagtaagatgaaactataaaaaactaaaacaatgaacttagctgtataaagaatggacttatgtgatgttttgtagagtaaggttgccatagtattatttcgccactccattgcgatcatatcagaactaatagcaataatgatgataatagcccattgtcctgcaccgaatccttgagataagagtgagggcgtcattttataacttgtaccaactgtatacaacattagtactaataaaacgagaatcccatacaatggaatcttgcgatgagcaaatttatagaattcgtgtgagagattaattttcattattatctcccccttgttcttgccgtaagatgttgacaatcttctgttctaaagttaagccagttggagccaaatattctatccagatttcattatcaaacagtagcttttgaattttatctatatctttatgatcaactattacagcatcatcttgtctatcaaaaggaattttagcttgttgtagcaaattggtagtttgctttatatcagttgtttttaatttagattttggatttttttcttgagtgaatttgctcataggtgaatttataataattctaccgtgattaataatgattaccgatgtcattactttttgtaattcacttaagacgtgactggaaattaagaaggctgtaccacgtgcagcgtattcatgtatcagttttcgaattaagattgtagcttcaatatccaaaccattcataggttcgtcgagaataaccagttgcggattatttaacaaagccaaagctattcctagtttttgcttcattccaactgagtagtcttttgcctttcgatcaatataatctttcatccctaatcgattaatcagtttatccataccacttaagtctttagcatagagctttaaattatcatatccagacagaaaaggataaatagcaggattttcaattaaagcaccaacagattgtagtgctaaatgatctttaagagtaatttcgtgatcattaaaactaattgaaccagtgaatttagttaatcctagcaaagttttcataatggtggttttgcctgctccgttatgaccaataagtcctacaatttcaccaggtgaaattgtaaaagatgcatctctaataatctctttgtgaccataaaaaatatttatattgttaacttttagcatgctatcctatctcctttaactccggattagacagagagttaaatcacttttctaattaaagtacctatattaaagtctagtatcctttcctgaattgtcaaattaagtgcaacagttgtaagtgtcaatgtttttgcggtagtctttaaaccattagtctaaccttaatttcttaaatatttatatgacttaaatttctgcttagcttgcttaaataactattgccagctacctgtgcggttaatgcgccatgctggatgcctaaatgaacttcatgacgcttctttaagctgtcacgggccgctgcttttaattcctgttcagtcaatacagttatttctgaatcttcaaactcgctgctaagccaaaattccagctctcgattcttgatgcagcttaagatcctaagcatgccttctgctccagattttgaccatttcttgctttgccccttaacacggtaggtatacttgcggtggttgctctcgcagcagccaatggctttagtcacagtcagttttcgtttcttaaacggcttaatatcgtcccaatgacgatcaatataattccttaggcgccccagataatcatgattgagctcggtattcaattcatcaattagtcggctttctgcagtggttaggatagttttaactttgtcatagctgtatttgtattccaaagcagaaatcagcttgccttgcaggtcaggcgcaaaatatagcctttctttgattttcttatttaggtgaaagacatccaagaaatgctcatgacgcttgcatagccctacaatgtcatcgaagtctgttttggcatatccagcaccgccatcggcgttgctaagaattacagtatcagaaagatcataagtattggccaggtactccttggcttcgttcagcgcatcaagtcggcttaaagaaacaaattccttggcattgattcgctttctgcgtttcttgcttatattgacaatgccttcacagacctgatagcgatgaaattccaaccggcttttagtgcctttgatcaccacgccatcgccttcaagatacaaaactgggacctttttcttagtgcctgcggcatcatatcttgaatctgcttcttggcccgctttaatatttttcccggccatttttaccaaattgcccacctgcatatggctaatattaaagccagacaggcaattgactgctagagcagtattgcgataagtggcaacgctgcttacttctaagatgtttttgactgctaaaatactgtagcgcttgtatttgtcaaagcccattaattcatccaagggataccttgcttgtttgcctgggcagacatatcttcttctgacatacctaacttcgccaaaagccatattgattgagcgctcattcttcttatcaatctgatagccctgtgctttaaccttggtaatcatttcatcatcaactttagctaaagccaaggccatgatttccttaatcaggtttaagaagaaacagattatttttctttcacgcttaatataattatcttcagactttataatatttgcgatttcagttacaattgaattcataaaagaccagcttctaatgtgttttttgttcttaacatcagactactggtctttttgtttgagctcaagtccaaattcaaaggacttgggcttttttaattatttattcaacttaccgtaaaaaattatacacttaggcaacagttaggctatgaagaaatatattgcttgaagagttcttctgctgtctgatattggaggattcggcgatatttgtggttaatggcattggttgcctgttgaacataagcttttgacttgtctttcatgctcttgcccttagggaagaattgacgcagaagtccattgcagttctcatttgtgcctctttcccaaggagaatatggatgagcaaagtagatctgacatcctttgattttggtcatatccgcaaactcagaaccattgtcaaacgtaattgatttaaaccaattaggatgtctgtcaatctccttttgaagcagtctttgacaagtactggcccgatagtcaggaattttgataacaacctcaaaacgagtggttctttcagtcagtgtcattaaggcaggttgatttttacgtctgacgcctttaaccaaatcgccttcccagtgcaggggaacttttctgttttcaacttctttaggccgctgttcaatcgaattgccaagattctttttatgcggagcatggccaccatgactatgatggcgtttgtttctgcgtcttttaagcttcattggcaggtcgatattgcttatatccagcaatccttgatcaatataacgatagacagtgggcgtgctaggacatggataatttggcataatcctgtgaaattcaccaacgaattcatcaatgctagtggcatcaaatttggctttaaagcgtctgcttagcattctgaaaaagacggcatagtgttgcagtggattacacttatagcagtttctgcggcgcttttcatgataaatttgtgcagtatcagcgtaatagtgctcatacaagacatagctgctgtctctttgcaggacactgcctcgtctaatttcacggctgatagttgatttatgacagcctacttcttgagcgatagcagtgcaggaggttatgccagaatcaagcagagcttgaatttgtccacgttgttcgctgttcaattgatgataatgcttggaaatgctagaatttgagttggtcatgaagatcttcctttcttgatttttggtcacatcaagtttaggtcttcatggcctttttgtttaacacttagtgttgcacttcaattttaaatccgggtctagtatccttttaataaatattttttactatgttcacatatgaacaataaatttaagattatctctaataaaaccgattttaggatttttttgaataaatttgctttatttgtttaaatgcagtttcaaaaccatcttttagagtattcaagccctgcagttctaaagcggcccacatcaaccgtaaattgcgatcatcatttgtttccaaaaaatttaacataaaatgcatgtatttgtatcttattttttcaaaagcaaacctgtctgtaatatctaagccagaaattattgcatctaatctttttgccttctttagatcttttttaataagaatatattctgcattaatcaaagtatttaaaatagctgtagaaaatttcatttccaaatcgttattatttttaaaatagaaaactagtgaaaaagataaactataaatagttcttgggctaataagattctgagtattaccaaagaagtacacatcatcgtaataccaaacttcatctccagataaaatttttgaaaagtacatcgataatctctttttatagttatctgtaaaaatatccactcctgtaagatcgtaataagcattacaataaatggctgcttttaaaaaagttcgtttatcgaaactgtcattttcaacttctgataacaattttttagattgcgtttttaagtaattaatatcattactttcatatgcttttgaaacttctaaagttatattttttagataattcgaaatattattattaaagaaatctattttttggacatgaattacttcgagtagtttgaatactttttcaatatctaaacctgcttcgcctctttcccatctttctaattttgaacgagaaatacctactgcttccgcagctttactacttgaaattttggttgcctttcttaattttctaccatatgtttctttcataacccactcctagttacgttcacaaataccttcaaaataatgatccagataaaggactagttttacctccttaatgatgccttaatgcaataaaaaatcaaactcataaatattacctaaattttcatttagagctactaaaaaagcctaataccatcatcaagggtattaggtctttattacctaggaaatactaacgtacagtttccaaacaatatgattttttatgacagtttgggcaacgcaattttctagtatgtggcgtgtgtgccgcaaacataaagcttttaagttctggaacaaatttgtaatcgcaattaggacaaatatatgccactttttgataataatttttaagtaacacgaatgacattgcaatcaagcttactactaaaatagctaccgaaatataggctgcagtgttcatcttattgatgatacagtacgcaataaatgccataccgaccaattcaacagtgatttctactgctgacaatttccacattgaacgtgttacctctttgtatctagtttcattattcatgattttcgtaatgtcagtaacttccgcaatattattgggtttacttagaaccttttgtagttggataattttcttgttttgctcttctaatttttgcgtttctgctttatttctttttagttgatcttcaagcaaaagatcgattaatttatcaccatttttatcttctagtattttttgaatatcctttaacgaaaagccaagctcctttaaaaagatgattaattttaattgttttacctgctcatcagaatataaacgatagccactttcactaactcgactgggtttgaccaaacctttttgatcatagtaacgaatggttctagtggttatgtttaacttctttgctagatctccgattgtgtattctgacattactttctcacctcacaacttaaatatacgggtttacgctacgtcagagtcaagaataagctaaattttccgtaaaaaacttcaaaaagcaaatattttgctcttttcctattgaaattattaacattaactgtataattttaagtgaatgttcactttatacaaatttcggaggactaaatgaacgcaatcagtaatttctttcatttaaaggagaacaatacctcctttaagaccgagcttttagccggtttgactacttttgtaagtatgtcatacattctgttcgttaacccaaacgtcctaggtgccagcggtatggataaaggtgctctattcaccgttactgcattgtcggctgcctttacctgtatcgtaatggggcttatcgctaactacccaattgcttccgcaccaactttgggcttaaacgccttctttacctatactgtttgtttaggcatgaaggttaagtggcaaactgctttagcagctgttttcgttgcatcaattctgttcattttgttaactgtctttaaggtacgtgaaatgatcattgatgccatccctgccgatattaaatatgctatttccgcaggtatcggcttattcatcgcctttatcggtttgcaaggtggtaagttgattcaaaacagtgattctaccttagttactattggtagtctcaacaaccctactgtttgaatcactatctttggtttaatcattactattttcttaatgattgccagagttccaggtgccatcttcatcggaatgatcgccgctgctgtttttggcatagtgactggtcaaattcccatgcctaaaggcgttatctcttcagttccaagcattgctccaacttttggtcaagcagtcttccatattggcgatattaataccgttcaaatgtggatcgttgtctttacattcttacttgttactttctttgataccactggtaccttaattggtttggttcaacaagcaggtctgatgaaggacaacaagatgccacgtgctggtgaagctctagcagctgattccagtggtatgttggtcggttctgttcttggtacctcacctgtcggtgcctttgttgaatcaagtgccgggatcgctgttggtgggcgtaccggtttaactgccgtttgggttggtattttcttccttatttcaactatcttcagtccaattttgagtgttttcactacccaagttacagcacccgctttaattattgttggggtattaatggccgaaaacctggcacacgttcactggactaatcttgaaattgccatcccatgtttcttaatcgcattgggaatgcctcttacatactctatttcagacggacttggctggggtttgattgtctaccctgtatcaatgatcgcagccaagcgtttcaaagaaatcacgccaatgatgtggattttgtttattgttttcgtaatctacttcgttgttttaaatgtaaaataattctatcttataaaccctatcttacttttacattaatagatacccccatctaaccaagtagcatgtctacttggtttttatgctaaaaagatgtctgttaatagtatggatgatgacagcagattctattagatgatataataatcaaagaaaggctgtgactaaaatgaaatcatataaaaaaattcaagctaatgttgactcctcactagcacttcaagcagaaggaatttttcaagatatagggctcaataccactaccgcaataaatgtgttcttaaagaaagttgtggcaactggtggtatcccatttgaattaaaagaaactcctgaacaaaaagcctcaagagaattaattcaaagcatctccaaaattccccacaaagaagctaaaaccaaaaaggaaattgaggattggctagatgaggactaatgatattgtagatatttatgttgcttacattgataagcctggaggaaaaaataggcctgtattaataattaaattactaaacagtaaagcttggctgctaaaaatcacttcaaaatataaagaaaaaagtgaaaatatccgaaagcattactttcccatttttgactggaaaaaatataatttagataaaccatcatacattgatactaaaaattatttaatagttactattagtgatttaaatatcgaaaaataccgaggccatttctcaatagcagatttacgcaaattaaaagattttattgacgaaaattcaaactaagaattaaactatatgttttagttcctaaacacaatctcaaatatgagattgtgtttttatttatccaaatggcatcttttgataatcatttgacgccttatgatgttcggattcttctaaattgccgctatactattttcaacaaatcgagttatgaaagatttatttaggaggaattcattatgacaactcaagaaggaaaaactgctttaattactggttcatacggtgggcttggtacccaattcgttaacattcatgcttcacacgggggtgacctaatcctagttggtcgcaatgctaagaaattagccgatcaacaaaaagaagcccgtagaaagtacaacgtaacggcgcatattatcgatgttgatctctcacaaccagatgctgcgcaaaagatctatgatacttgcaaaaagaacggttggactattgactacttaatcaacaatgctggctttggtggtcaaggcgaattcattaaaagaagtatggaacaagacatgtccatgatcgccgttaacattgaaacgcctactcgtttaactaaattatttttacctgacttcgtaaaacgcggccgttatgcctggcccacttcaagccgtttactacgctactaaagcatacgttacaagctggtcaaatgcgttatggcgtgaagtacaaggcacaggcgttacggtaagctgcttaatgcctagcgctatgcaaaccggttttatcagtcgtggtgatttgagttcaactcaattattcgcccatgcggttagtccataaggtgttgcaaaagctgggtatgaagaaatgattgaaggcaagcttaacattaccgctggtttaactgcagcccaaaaaccattcatgaaattggaaccaatgttacctaagaagatgctcatgaacaatgtttataagatgcaagaacaaggtagtagaaagtaatcaacttatcttataatatggatcaaaaggatggtatttgaatgaatcactttattttagatggtcgctatgaagacctactctcttttaacgttgaagaagcacttaaaaaagccaatattcctgaagattgtttcaaaaaactccatccttcaatgagtgaacaacaatactacaattttatggcggctattggtgatcagattagtgatccattcactccaattgaaattgcaactacaaatccaattgaatctttctctccaccaatttttgcggcatatagtagccgtaacggagatatttttatcaagcgtctagccaaatataaaaagctgattggcccattatcttttaaaattgatgaggatagcaagcagctctctattaccctaactccaagtaatcagcaatattccctaccctcttttctagttttatcagaatttgcatttttagtgggacttttgcgcaagacgaccaaagaagctatttccccgctgaagatcacaatgacatcccccgtcaatgatgagcaggtcattaacttctttggctgcaaaatcgaatcgggtaaacgcaacaccatcacttttgccaaaaaagacttgcaggtcaattttattagttataactaagcaatgtgggattatttcaagcctgaattaactaaacgcttatctgaattatccgttgatgattcaactagtgctagagtacgtagcatattgaccgaattacttcctaatggtgaatttacaattgacgatgtagctaaaaagttaggttattctaaacagactttacagagaaagttgagtagcgaaaaccctacttttcaaaaacaactgaactccacccgagaagttttagcgctaaattatttacaaaacaccgatatgacaactagcgatattgcttaccttctaggctatcaggaatttaattcgttcttacgtgccttcagcatctggaaaggcataagcattagcgaatatcgtgaaaaaatgaataaataataaaaagcagatatattttctgtttttttactttataaaggaaataatatgagatttttgctataatttactttataaaggaaataatatgaaaattgctaaaaatttactttatgaaggaaataatatgcagttaaatttaattaaccgcccacagtatttaaatcaattacttcaatttcaaaatacagaattcatcaaagtactgacgggagtacgaagatcaggcaaatcttatattttaatgctttatcgtgaatatttactcaaacacaacataaatgaacatcaaatcatttatatttcttttgaagactttgataatatagatctttatgaacctaaaaagctttattcatacttaaaagaacgaattattagtgaccaaagaatgtacattctacttgatgaaatccaatatgtatcagattggcaaaaagtagtaaatagccttcgacttaatcctctacttgatatcacaattactggcagtaattccaatctattaagtggagaattagcaaccttactatcaggaagatatgtagaaatacatgtttatcctctttcttttaaagaaatgctagattttaaacatatttctgaaccatcagagcgtcagattgataacttatatgatgaatacattaaatatggtggtttccccgcggtagtgttagcaaaagaagaattaaaacaaactattctttctggaatttacaataccattattgtcaatgatatcggctacaaaaatggattaagagaaccagaattagttgcattagtagctaaatatctagcagattcgattggtcaattaattaatccgaacaagattgtaaatacactaaaatcagcaaattttgatatctcttataacgctgtgcagcgttaccttaaatattttgaagaagcatatcttttttataaatctagtcgttatgatattagagggagaaagattctttctactcaaggtaagtattacattgtagatactggtttgcgtacccaagctttaggagaaagaaataatgaccgcggtagtgttttagaaaatatagtttatgtcgaattacttcgccggggctacacagttcaaattggtaaattagataataaagaaattgatttcatcgttttcaaggtaaatgataaacaatatattcaagtaacctaccagcttccagaaaattctactagagaaactgataatttacttcaaattccaaataactacaaaaaaatagtcatcactggccgatatgaaaatgaagaaatgatttccggtattccaataatcaatattaaagattggttattaagctctaaaaactgatcaaaataggatcgactaactcatgtcgatcctatttttaaattaaattatgttttttacaataagtaaaaattccgtcatcttgcacgctgccacagatgtcatcagcaatttccttcacatcgtctgttgcgttccccattgcaacgccgtgaccaacagtctttaacatttcaatatcgttgccgccatcaccaaaggctattgcttcgctcacagggatttgataataatctaacactttttcaattgctacacccttactaccagtagctggaataatatctgctgctctatcccaccaagctgttaccttagcattttgcgtattagctacaagtccgtcataatctttttcacgacagcctaccattatttgataaaccgtatcctgatcgacaaccacatcaaaatctggcgccactctcaaatccgttccaccaatagcaaagtattcctttaaatcctcatcaacaccattagctgcaatccgtgttttggtagctacagctaacggccgatttattttctgagcattttgaatcatatgcaagacatctccttgccttaacggattatcaaaaacaatgtcttgatcgttatagcagtaagaaccattaaaagttaaatatgcatcaaaatctacacccaacttaggcagttgcactggtggtctgcctgatgcaatacaaatcataatgccgttgtcttgtaaagcatgcagtgtctctagcattttaggtgtaattgattttttcttttcaattaaagtaccatctatatcaaaaaatattatcttaggtttgctcattatttttaccttctaaagaattttctactaattattatactttaaccgatatttcccaggaaatattaaaattgagctctcttcctcaacatctgtgctaaactagatacaattagtttctttaaaagttaatagttacggaggaatttttaaatgcagacattggaaaaagtctttcatttacaagatgctcataccactgttaaacgtgagttaatcgctgctttaaccacttttgtcagtctctcctacatcttattcgttaacccaaacattttgcacgcagctggtatccctaaaggtgccgcttttactgtaacagctcttgccacagcagttgggtgttttttaatgggttttattgctaattatccgattgccttagctccaaccttaggtagcggtgcctttttcgcttataacgtatgtgttgggatgcatatttcttgggaaacagctttggctgcagtccttgttgcttcagttttattcattttaattactgtctttaaattacgcgaattagtggttaatgccattccacaagatatgaagtatgctatttcagcaggaattgggttattcatcgcttttattggcttaaaaaatggtcaattaattgttaacagcgattcaactttagttactctgggaaaatttagtactccagcagtttggatcacattatttggcttaattttgactgttgtattaatggcattaaacgtgcctggttctatctttattggaatgattgttactgccatcttcggtatgatcattggtcaaattccattaccacataacatcgtttctggtgccccaagtattgcaccaaccttcggccaagcggtttttcacattaaagatattaatacagctcaactttggatggttgtactaactttcttattagttaccttctttgatactgctggtactttaattggaatgactgaacaagccggtatggttgacaaggatggcaagattccacggatcggtcgtgcttttttggctgattcaactgctatggttgaaggtgcagtctttggtactgctccacttggaacttctgttgaatcaagtgccggaattgccatgggtggtcgtactggtttgactgctatctttgttggtattttcttcattatcagtatgattttcagcccattgttacaagtaattccaactactgtaacggctcctgctttaattatcgttggtgtactgatggccagcaacttaaagaaaatcgattgggaaaagttcgaaattgcctttcctgcttttcttaccgttgtagggatgccactgacttactcaatttcagatggtttggcattaggcttgattgcctacccaattaccatgattgcttctaagcgttataaggaagttagtcctatgatgtatatcctgttcgtagtatttatcatctttttcttagttacgaatttataaaaagaatgctaaagataagcagtttgaagctgcttattttttattgacttgatttttattttgtactactgtaataaatatataagacagtttttatgggagaagaaaaatgagactgtaaaatagtttgtgtaaggatgaatgattccttaaatttatttctttaaacattagaaaaaggagttcctttctcgtatgattggtttgaacaaaaaacacatacagaaagaagaactccttcatgaatgattttaccaaaaatatggctcaagcactattcgatcaagacaaagttaatgattttttgcgcaaggaaattcaaactgcagttaatcaattgcttaaagttgaattgactgcctttctgggctatgatccctatgccagaaatggctggaatactggcaactctagaaatggtgcttatttccgcaaagttgatacgcaatttggcccaattgaagtgcaagtgccccgggatcgcaacggtcaatttcatcagcacacgctgcctgactacaagcagcactcggatatcttggaaagcatgattatcaagctttactccaagggcgtgaccaccagggaaatagccgatctaattgaaaagatgtatggcagccattatagtccagctcaggtatcaaatatttccaagcagatgctccccaaggttgaggcttatcacaagcgcaagctaagcgacaagtttttctgtgtctatttggatgcgacataccttcctttgcgccgagaaacgtttgagcgtgaagcagtatatattgccattggcattaaacctaatggacataaggaagtcattgactactgcattgctcctagtgagaacattgaagtctggacagatatgcttcaaaacatgaaggccagaggcttgaagcaagttgaactctttctttctgatggtgttgttggcatgaaaacagccttggccaggacttatcctaaagctcattttcaacgctgtttggttcatgtcatgcgcaatatctgcgctaaagtacgcgtcgacgatcgtgaaaagatcatgaacgaattcaaacaggtgcatcaacagacaaacaaagaagaagccacagctgtcctgcatgacttctataccaaatggggcaaggtttacagccatgttatcagaagcttgaaagacatagaaccagatctgctggtcttttataactatcccaagcagatcagagcttcaatttattcgactaacatgattgaatcatttaacaatgtgatcaagcgcaaagctaagcctaaagcagagttcccaaatgaacagtcgcttgatacttttattggcattcaagcaatgagctacaacgaacgctatttcaatcgaatccacaaaggctttggtcaggttcaggataccttagaatcctactttgattaaataaaagattaaaaaatcaatttacgagaaagaactatttacacaaaagatttgacagtttcagaaaaatgaaaatcaaaaaagtactactgaccacgtctttactcacgattagtttgattactctatcgggatgtagtttccacctgtttaccaacaagaattccggtcctacaatcaaacgaactttgtcctctaagaaattcaattcacttaaggtagccagtgacattactgatgttgaattacatgcaagtaatcaatacaaagttatctatcatgggctcaagcgtttcaaacctagcgttaatgtgaaaaatggtcagttaaagatcactcaaactagtaatggtgtttcttataacatcaaagaaggcaatacagtggcaatctacctacctgccaaagaattacaaaatatcaatattaatctttctgatggcgatatcgatgctgatggcaaggttcaagcaaaaaatgtcaaacttcacagtgacgatggtgatgtcaactttgacgatttaagaattagctctggcaaaattacctcagatgacggcgatatttcagtttctaatctacttactagaaaaggcgccacagttgaatcagatgatggtgacattcgtattagaaagagcaatgccagtggttaccgcctaacttctgacgacggtgacgtcacattcaagggagatacttctgataatgatgacggtggttcttactacaaaaatactaagagttctaacctgctctctgctcacagtgatgacggcgacgtcaacgttaactaaatttcgtcataaggcgataagtttcacatgaaacaaaaaatcaatgcatcattgataatgcattgattttttacttttttcctcattcatagcataaacacgactttacaagattatttaagtttctattgaaatagacataattttaatacgaaaaagataagactaaattctacttttccattaaaaaatatttaccaattttccattttctaagtcaaaatgatgcgtaaatttcttcatcgtcgttgatgaaatatggtggtcaatttcaattactgttaatggtgaattcaaaaagacattatgaatttgctcagcagtttgcggatcaagtgaagcagttccttcatcaactactaaaatttctctttggaagagaaaagcacgcgctaattcaattctctttctttccccacctgaaagattatgcccattttcttcaattacggtatctaagccatgtttttgaaggtaattagttaatcctgcttgttgagccgcagccacgatttgcttttgatcaaattgtttaccaagagttaaattaaagcgtaaagtcacattaaaaatttgcgaagattgttgaacttcactaaaaatttgcgtttcaacagcctgatcattaaccaaaactcttcccttctgcggagataatttacccattaacaccttaagtaaagtagatttaccttcaccagactttccggttaacagaattttatctcctttattaacacataaactcacattattaagcactggactatcagcttgatagccgaaagttacattgtacatatttaattgcttaaatttgactggagcttcatcttgcttagtcgttaaaggcttgaaagataacaacttagcggtcattggtttagtagcagcaatctgattacgaatactattaatactaaagaaactatttacaatccaagcgctagagtattgaacggcaacaaaagaagccaaagcaatgtgtccttgaattaccataataatgccgattccaattggtaagaagtctagtgagtaagctaataaatcaacgtaaaaatcacttttagcaattgtatcgtcacgttcacgtttattctcaacagaatttttaattactttactacccttctttacaaatagagataatacattgtaatttaaaaccgtattgatatttttgagtaaatccgacataaacgttacataactacctgttgatttactccaattggatgactgattggctgttttcttgctaaacaaactaggaataaggcttgaaagactggcaaaagcaacaaagactaatgtcaggactacactatttatcagcgcaatagtaacgataccaacaattttaaccacagtagatactagtgaaaataactgtctaaagtacttttcttcaatcaggttaagatcattattaatgaaagaaattcgattagaaatttctttttctcctgtttttacaaaatccgtctgcatcagatactcacgaacttcttgattaaatagtgctacattacgattaattactcgattatttaagtattctacaattacaagtaagatttgcaatactgtaattacgataatcattctcaccgtatttggaatacttttacctgtaattaacgcaaaaatttcggagtatgaccatgtgctaaaagacaaagataatccgcttaaacatgacagaataatactgagcgaaaaccatttgaggtcaataaactttttcataaatgaatctccctttcaattaagttggattcattatctgctttagttcacgataaaaatagctttctgcaaaagtgatcttcaatctgcatatatgcagattattctggaagaatagacagaatattttctaaattacttgccttgatcaatttcttaatagctaatacctgctctgtatctccagcaaaatagcattgataaaaatgaccaatgattttatataagactaaagatggcgtttgacttaattgcccaagtaaataaataggctctttattatcttttacaaatttattttcagcacaagtatataaataattcacacaaatagtggcaattgttgtttgcattttttctgtctgctcagacattttatcattataagtagtgaaaattttttgaaagaaaaaagcaaaatcgtcatgagtaaagatagaggtaccaaaattggctaacaaatctaaactaaatttatcttgaagccaattgtcgcctgcaaacaagcgttgcagtactatatttttatctttgacatcaaatttacgttttccttctagcaaggtaagaatcaacttagctttgattttcagaagatcatgatgaggcagttgttgaatttctgttaccaattttctaacttggttaaagtcttgattataataagcagtctgtaattgatcacctaaattgttttcatcgtcagcttgtgcgactgaattttgcttaaagaattcatcaaatgaaattttatttttctgcaaaattgccattaagtccttagctgatatttcatgcaatccgcgctcaatcttagaataatgggcaggtgataaaattcctgctacaaattgttcttgcgtcagtccccgcgattggcgcgctttttttaatgctgtgttaatttccatagctgtttttatttcaatttacggtcccttttagatacaaaccaaattgtcccatcagaagttgcccagtgtccatcagaagttttatgaaatttcagcgtcagtttcttactgtgtagtgtccagctatttttaccttccattgtgacacggacccggcctaatttttctgaatttattttgttattgtagtctttgggatcatatgaattatgcccatatactttataaattgcttttgctgccgcagtatttggcttaatgtatttataagtaccagatgcatcagtcttaaaaactgggctggatgcatcgatttgaccactatttttccccagagctatgttcaccaacatgccaagatgattttccattacagaatctgtttgatggggatcataggttgtaagatttttattagcaaactgttctggaatagtttgctgattgcgataaaacaaccagccaccgactgccagaactacgactactacaacagttatgattgtagctttctttttcataaaggatcacctgttatctatcagcttttttctgaaaagtaattaatccgtgtgaaactaatctaacagttccgccataataaactacccaacgtactttgccattactgtactcttcatacattctctcccgctgaagatatccattatatgtaccatcattataaggaatttccatcggagtatctacagcaccatcataagcgccataacgcgtcttatgccatgggcctgttctcttaactccatgaacttttttagttaacggtagtttttgaacgttttaaactgaatctgtactagattccgcagcagatacaacagcagtattagtggttgcaaacagagcagttgctgagaataacactaaagttgcttttcttaatttcatatctaacaccttatacctttcttttattgtttattttcattacctagttgttcattatcattgacaacaaaatttgtcatcattttctttttacttgctaatgtaggaattgggtagcttttaagtttagtattatacaaatagccaccgtacataattcctgttggattatgccccattggaacagtgtacatcttttccagatatcctctaaatacctcattgcctcttcttacagtgtaataaacataagtaccctgatcacgatagtattgacgttgataccagatatgttcaacaaatccttttgattcagtgctttgtgttgcagcttgtacatggtttgattgaaccaaagctgaagttgaaactgatactagtgataaagctaatgctgccttagctgttaaagttaaaattttcttatttcttttcttgctttaattactacctaatccagacggaataggaacccatggacccatatttttttctcctttcttatttatttttcattaattttactttcactactaagaactgttcagaaattgtcaaagatgacaattttctacaataaaattcttaatcaaatgagacattccattacttttcataaattcaataatctgatctgcttcttcatttttgccatcaaaacaataatggtaataattggcaactattttagcaaaagcattacgtggaatttctggcaatttagaaatgaaatcgtaaattagatttaaatcaattttccttctttgtacgtatacattagccaaataattaatagctattgctgacattatttcttgtagctgaccagacagattagatacattatggcgatacgttctaaatattgaattaatcaaaaagtccatatcttctggggcatatatcatcatagtcattgcaaaaatttgtagagtagattcactccactcatcagaatcaaagacaatttgtctaacttgtcgtttaatattctcagatatttgatcaatttgtttctttaaagatgctattgaaaataccactaaagcataaagattaaatatattctgactttgatttttatattttccaatttcaattttcaaatcttcaagtcgttcgatctgctgatgataatatgcatcttctaattgcttttgccagatcaaatttttgtgagcaagatcattttcactatcttcattttctattcgctctaaaaatatagaagcttgcaatccatgttgctttaacaaatcaattaaatcctgagtctgaatatcatttaatccacgttcaatttttgaatagtaagatgttgataacacatcccccgccatttcagtttgtgataatttcatactttttcttgtttgttttaatgcttcaccaattgtcatatctttccctccctcgtattatcatatttttcattattgtataatgttttgttaattttgcaatagtttgtaaaacaaaagcattatttttatttttcaatcttttatgtttacaaatgtaaacttagcaagtagaataaaaaatgtgaagagatgaaaataaattatttaatttggaggttacggtcatggatgtaactaaaatcattatccttgttgtcgcaatcgccttgatcggctttatcctttggtggttcttcggcaaacatgacgaagctatcggtaaagcaagtgttaatcaaggcacacaagaagctaacatcgtcgttaacggcggttactctccttctaccattgttttaaaacaaggcgtaccagctaaggtgaattttgatatgcaagactctaccgcctgcttatcgcacgttgtttttgaacaacttggcgttaacaaagatttaaccaagcaaaaaatcactacaattaatatcccgactgataaaaaaggcacttataacttcgcctgcggaatggatatgtttcatggaaagattgaggtcaaataatgagtattttttcaaagaatcaaatcaaaaaagttgtcgttaatgcagataatcacggttacaagccagatgtagttaccttcaagcaaggcaagcccgcacaattgaaatttatcccatcagataatatgggctgcatgaatgaaattgtatctaaagacctgggcttcgatcataagctcgatggtcaaaaagaagttgtggtagacatccctaccgaccacgcaggaacttataattacgcatgtggcatggacatgtttcatggaaagatcgtagttaaataatgaaattatctaatattcagcgtttctggatctcctttgtactctccatcccgatgctcattcagatgattgccatgccatttcactggatgatgccaggatacaactggattgcccttattacgacaaccattatcatggcaatctcagctgcaccatattgtaagagtgcttggggcgccttcaaaaagcataacgctaacatgaatacgctagtggccgtcggtactgctgtggcttacttttacagcatctacgctatgttcactggccgcgaagtttacttcgaaagtgctgcttatgtaacggtctttgttctacttggggatgccatggaagaaaaaatgcacagcaacgcttccaacgcactagccaagttagtcgacctacaagctaaagacgcagcagttttacgttacggtgaatttgtcaaagttccactcgaacaagttaagccgggtgatacaattcgcgtaaagccgggtgaaaagattccggttgatggtgtcatcactgatggctcaactaccatcgacgaatcaatggtcactggtgaaagtatgccggttactaaaaagaaaggcgacaatgtcgttggctcaacgattaacaccaatggtactttcacttttaaggctaccaaggtcggtagcgatacgatgcttgctcagatcgttgatttagttaaaaaggcccaaaccagtcatgctccaattcagaacttgaccgacaaaatttctaatatctttgtcccagtcgttttaattattgcaattattaccttcgtaatttggtatgttttcttaggcgcaacattggttaatgctatgctcttcgccgtttcagtagtcgtaattgcttgtccatgtgcactaggtttagcgacaccaactgctttaatggttggtactgcccgtagcgctaaaatgggcgttttaatcaagaacggtgaagttcttgaagaagttagcgacattgataccgttgtgtttgataagactggtacaattaccgttggtaagccacaagttactaatgttgtaggtgataaaaacaaggtcttaactattgcagctagtttggaagaaaattctgagcacccactagcaaccgctgtagttaaagctgctaaagaagcaaagactgaaattaagtctatacaaaactttgcagctattgaaggccgcggagttaaggcaaactatggcaatcaagaagcttttgttggtagcgatcgtttattagaagatatttctatttcccaggaaatgaaagatcaggctctccaacttcaaaaagaagcaaaaactgtagtctatgttggcctaggtaatgacatcattggcttaattgccattcaagatgtacctaaagcaagttctaagcaagcaattgcggaacttaaaaagcgtggtttaaagacggtgatgcttaccggtgacaatcaaaatgttgctgaagctattggccgtgaagtcggaatcgaccaagtaatcgccggtgttttaccaactgaaaaagccgctgagattaagaaattgcaggatgaaggcaataaagtagcctttgttggtgacgggattaacgacgcacctgcattgtctacagctgatgtcggaattgctatgggatcaggtaccgatattgctattgaatctggcggtatcgtccttgtacagaatgacttaatgggcgtagttagagcgcttgagatttctaagaagacctttaacagaattaaattaaacctcttctgggctctgatttacaacacgatcggcattcccattgctgcaggtttattcatggcctttggcgtgcagcttagtcctgaacttgcaggcttagctatggccttctcttctgtttctgttgtaactagttcacttttattgaataaaacaaaaattgctggtgaaacagctcaagtttcaaagtaaaataattctccgaccggatattttaatccggttttctttttgtaaatttttcaatttgcgacttaaagtttcagcagtaatacccaaatatgatgctaagtctttcttttttaactttaattccacatttttactcccctgtttttgagctaagtcttgcaaataggccattaagcgttcctgagcatccattgaattgcgccgaatagagttagtttcgattgtaaccagctgctcgccaaaattattaagcaaattcaatgctaaatctggcgtctttttcaataacttttgaaaatcacgacgctcaatagaacaaacataagtatcttgtaaagcctgcacaaagttttcctgggcatgttcttgaaaaagattctgctgtccattagcatcgccttgattcagcacacctaatacggtctctttaccgtcttcgttgagattgtaaatcttggcactgccttgatccataaaaagcattccgttcttaccatcacctggttgtcgaataatactgccttttggaaaatattcttggtgcgttgaaattggtactagtttttctaacatttcatttggcaaatttttaaatatggctgctttgcgaatacaagccatgggtgaatgttgcataaaagcctcatttcttgatctaagtcaatttatttttatctgcatcttaatacaatgtatttaacaactcaagcagaaaggaaatattaatcatgactaaatacatcgcacatattgagcctttaaacgctgaaaaaattggtactaaggcacacggtactgccacttttgaagaaaaaggtgatcaactacatattcacgttgagatgtttgatactccagcaaatattgaacactgggaacatttccatggcttcccgaatggtcaaaaagctcatgtaccaactgcagctcaagacgttaaccatgatggctttattgatttaccagaaactgagccggtctcaggaactacaatggtgccacttgatgatgccccagaaaacatgaatattcctcatgatggttatcctgttgccgacagtaatggacattatgaatatgagattgatgtctcattaacaaagctacaaaagaaattcaaagctgcctttggtagcgataaactacaactagacaagcgtgtagtttacgttcatggtgtacctgcagatctggaattacctgatactgtaggtggttgcgtaatgagttatgatgcccatactaccttgccaatcgcagctggtgaaattgaaaaagcttaagttaaaagccattccttgtgaatggctttttgcatcctttcttattttttgatagcatagatatagattatgtaaagtatctaagaaaaggagatgttttataagtaggcttagatcctactcttatggagaataacgaaaaaattatccaagaaaagaaacgcgaaaaatttattaaaactaaaaagaattacaagcgtgcaccactaatgtcagttcacttaagagtgatgatggccgttatcttaggtcaaatcgcctgtggctattccctgggaattagtggtaccgctctttctaatgcagctaaatatatcaacattagtgacttctggactggattaattggggctggtgctttaattggccttgctggtagtcttttggtcggtcgactttctgataaaatcggtcgccgtaaactcttaatgtggaatatgtatatattagctgctttttctttattacatctaataaccgctaattttagcttaacctttatcctccgtattggaattggtttaatgattgctgttgactatactgtagggaatgccttgttaaccgaatggctacctaagggtgaagacagcaagcgccagagtcatttattaatctactggactattggttttattttgtcttacctagctggtagttttatcactggatttgatagttatacttggcaaataatcttagcaacaagtgcagtacctgcactagtaactgctatcttcagaagtcttttcccactccctgcttcaccaggctggctagcaagtaagggtaagattaagacggccaacaaggtcattcgtaagcacatgggacgcaaatggagattacctgcccgctttatgaagcggaataaaaagaaaactcctagaaatatttcctgggcaattttattttccaagcaatatctgcgacgtactctagtaggtgggattttctatgcctgccaagccttctcatttttcggtattagtatcttcttgccaattttattacaaagcatgaatatcactagtggaaatatctcaggaattatctacaatggtgggatgttcattggtgtgctaatcggtacctggatctttaacaaggttagccgccgcttctatcttatcagtaattttctaatctcaggtctgctaatcggcattttagcaatagtacctaacttaaattcaatacttaaattaggtatttttacgttatttgcgattattttatcagctggtttgatcctagattatccttatccgactgaattatttgatctgaaggtacgagcaactggtgtaggtacttgtattacaatcagccgaatcggggctgccgcagggactttcttattgcccgtcttaactaatgtgggtggtgctagcctggcaatgctagtttgtgcgattgttttactctttgcctttatcgtttgcctcatctgggcaccggagacctcaccccaatttatgaaaaaataaaataattaatatgctacacaaaaagacagattacatatgatgcaatctgtcttttcttatttcttatcttttttcttcttgtccttagaatccttatttaataattcttctggatccttatgcttaggcgtcttctttggatctggtacagttgcaaagcgatcaagcatcttctgtaagttattagggttgtcaaaagttaatcccataaaacatcttcctttcgttttctcaattatattaaaatttcaattcaaatgacaataattttaaccctcattatcaataaattgttgcatcttaatcatttctgaaccagccagatcaacactaattaaatcactataatcatgaacactagtatctcctaaaccatattcagttacaatttttaggtcgaagccactatcagagcgatcttcaattaagcctaaacgatcaggataatgataaattgaatcactaattttcactatttgatcttcgggccaattatcaataatttctgctggtgactgaatttcatcccgtaatttaactgaacgctccagcctgtccggatcaaaactgccattatttttttgccattgaactaaaaaattaaagaagagcaagcgctcggaatcttcagtaatatgcgttatatggctcctagcaatcactgcaattgattcaacctgccctaactcattgatgctctcgaataccagattatcatcgtcatacttgagtactttaccaatagcaaaactaccatattgatcatcaaaggtataatcaaaataaatttcaaccagatccaagtcgttagtgaattcttgcttctgtgattgccgcaaatattgggtaaataagcgattatcaatggcattagtatcgacacaaacaatatcgtcaagtggtataacggtggcataatgctctaaagttaattcattgcgttctaaaatacgcacctcttgctgatcaagttgagtaattaagccagtgtaagtagcacctgtattcacctcaaaagttgtaaagggttgcgcgtcagctacgttaatcagtaaatcatgcagattagtaaaatcccaggctaacactgtcttatttaattgctctaagttaaatgaatccttaacttgggtaatcatataatagcgtagattaggcgtatcgtcttcaatcttagctacttgatcttctttaataaagactattccacctaaattaccgccttgatcgactgattcaaaggtaatccagccatgatgttgcgtgataatgcggccaatatagtaagaatttgcatcaactaccgtaatacttgcatccccacctaagttatatttttcttgatcagccttaagcgtgatttgtacaagtttattcaatttttcgccccctcttttttcttccgtgaatttaattgtcgcctaatcattatttttctgcaagaaaaaagaagatggtttagccatcttctaatattgagttaattctgtagaattttggggctaacgaatattacttcttttgtgcagctgcctcagcttctgctgctgtgtttgaaggggttaacgaagtactgtttggatcaaaacgcacatcgcttgcttttacataaccatcagcaaattggacttcaccttgattactatagacagatttaccaactaagtgataaaacagttctgccttattttcacttggtacccagatgtaaagcaacttatttaccttgtatcttccaccttgttttctaacttgatcgcccttgaagtcaatcttgtttccgttagcatcatagatatcagttggcttaataaattgaattagtgattttttagtatgataataattttgaactggaatatctttagcagctttaacattgaaattataaatccaataatcagttcccttaatatgatagattgctaattcgttgtcatcgtcaccatctctaccagtatcagcacgtgtcccttgctctaaacgatccactgtaaacttatcaccttgttttgcgtattttcctgaaggctgaactgcatctttatcaggtacttcaacaaaaagagcagcacgtttatcagttacagtaacagtcgtttcttctgatttagttgtttgagacgaagaagaactagtgttgttatttgtattaacactaattacaggacctaaattataagacttaatgtactgtttattaggtccacctattctaaagtaatgctttccgttcttaaatttgtatgaaccgccataagtcgtgatagtttcacccttatacaatttccaacggttattgtaagaggttctgccagttgaggtacgataaatgtaagtattatgagtaatcttacgtgttacaccatcaatgttggtagcctttatgtattgatccttgccgcttactttatagtaaagcgagccgtcaattttcacagggttgctttcaacagtgacatattgataggcattgtattttacacctgtgctgttaccatccttgtcgtaagctaaagcagtatgcataactgctttagtcgtagcagcttgtacttcattagttgtattagtcaaaacagccaagggtgcaactgtcattaatgtagctgcagaaattaatgcaatcttatttttcttcatcataatcatccttttcaaatctctacactgctattatattctctaaagctaattaaagcattaaaaagaagccaattaagtgaagtggacttctacttttgatattttcttttaatttattttttcaatgccgttgcctcagcttctgctgctgtgtttgaaggggttaatgtcaaacctatattaacaaatttaacatcactagctttaacataggcatcattaccaacttcaatttgatcaacgttacctgtagcatagaacttagtaccaactaaatggtagaataattctgccttgttttcacttggtacccaaatgtatatgagtttatctactttcagatttccaccttgttttacaatttttgcgccattgtggttttgcatagtaccgtcagcattatacacatcagtatccttgacaaatttgatatagccataatgttcgtgatcataatcatgctttactaattttttatcggcagttacatcaatagctaaaagccaattgtctgtaccttttattctatacattccagcttgtgctgcagttgatggaaaatgatcagcaaacggagtaacttctagtttatctacaataaacttcgtaccagctttgagattctttttgattgctttaccttgattatcataaatatttacaccgtaagcattttttacggtaacagttgcttcctcggcattagtattagtagcgttgtttgattcattgctggttaaatttgatgcagtattagtactaataactgggcctaaattatatgatctaatatattgcttacgtggcccacctactctaaagtaacgtttaccgtttttaaatttatatgatccaccatatgtagttacggtttcacctttataaaatttccatttcttactgttggcagtcataccataaggtgtcctttgagtagaagtccggtatatataagcattatgagtaatctttcgggttacaccatcaatattagttactttgatatattcatctttatctgtaactttgtaatattgacttccattgatagttactagttttggatctacatgaacactaccataaacgtaatatttatgaccggtactatttccatctttatcataagctaatgcgttgtgcataatagtcttggttattgaagaatctgcttgtactgtatgagcgctagttgtagtactcaggataggtgccgttcccattaaagctactacagaaattaacatgattttattttttttcattattaaccaccctttgaaaatctctatacttcaattatcttactttgtataaacttagacaacaaaaatagcatcaaatcatattgatttgatgctattaaggctaaaatttacaaatttagtcccaagctaattcataaaccttatttgaaacagttttatttttaccgttaacattagcatggtatgcaacagttaagtaaccgtgattttcatcaataatttggatactttcaacttcactatgttcacctgaaatatctaatccaccaaatgcacttaagtttacattttcccattgagattgatcattacgtgcataaaacggaatttttacaatttccttgtgatagtatgaccatgaaccattacttaaacttggtgatttttgactagtaatataaatattaccagaattatcaagatcataaccttgtacagagtttaaaacagatccatacaaaccatatactgtaaaactagtttcacattgataatttcccatatttacgaaaccattatttccagcctcatctaatgcattattaatgacatttaggtcataaattgaaaagtggcctgttccattattctcaatagtagcaattaaaagcatactataatctggtgaaactgctacttcagcgcgttccatttcatcaccagagcattgatcttcaggattacctgcgcggttcaagtatgctaaacgtgggaattcagtatttgatgaagcatatgatttgtatctaatatctgctcgagcaatttgagaagcccatttattcttgtttttagtaccaacgaaccatttaccagatctacctgaatattcccaagtttgggtgtgtccagctgctgcacctactaaagtaagcacaggggttgtcacgttgccacggaagccacgcaatacatgtgtttctgtctggttatttcttaactgtaaaccataaacatactttgatcctacattacctttttgaactacagctctgtaacctgtattcatatcgaatctatctaaaattctaatatttgttgcatctaacataataaaacctccgaaaaatttaaaaactactacttatcctgagtttgctcattcatctgtttagccacttccgcaaagatctcctgcacttcttgcctgttcagcttgaagccttttgcttcaaggctgttcactactgcgttgccaacacggttaatcttctgttcgtcagaaagattttctttgtcgtataagcgtacatagcttttcattaaactatctgcagtattgcggaattgctctaagcgtttattcttgaaatgaactctgctcaagatgccaatacctactacgctaattacccataacgccagagtaatcagctcaacgtaatcatgaatatccataattgaatgaatcacctctcttttgatcaaacgatccaagggggctaacgaatgtccattggacttcacctctgtttgataatgttcaacaagacactaatacacttgatttatattagtttttagactaatataaatgtataagaaataaccgaaagctggtaaatgttccgccaagaattttattaacttaggttgttttctttttcatatctcgttgacaatatttactataagttaattaactaattatgtcaataaaaaaagctaaaaaactattattttttcgaacaagtattcctgaaaggcttggtatgattgagttagagcgcacaaaagaattagcaaaaaaatacaaaatgaatctccgtgaagtaaatgacaaggcaggtttaggtagaaattccatctataattggaagaatcaaagaccaggaattgatgcacttaatgcagtcgcagatgtactacatacgtcagccgattatttaagtggtaagacaaacaatcctagcccgtcacctaaaggtgatgaaactggtggtatttctattgatggtgaagtaccatatttctatcatggctacactattccagaagactacctgaacatagttcgtcaacttatggaacgtgatatcaaaaaaggacttattaaacgacatgacaacagcagatcagaataaacaagaactcatagactggttattagcctatgctaaaaaacgtgatattatggttgaattagttgaagtaaatccaacttacccatccatttctttaaagaactatagattcgctgtcattaatactaattggcatcatcaagaagaagtaccattttcaataggtcatgagattggtcacattatgctgactaatggtgaagtagattctcgtcaatatatcacttttacagaacagaattccgaagaaagtccagcagacatcttttcaataaagctaatctataattactcctgcaaaatgggtgattgcttcgaagatccaggtttatttatgcaagcatacgggataccaaatcgagtagctgatgcaactaaagagatatttaagcgagcagcttaaccatcaacttctatattgatttgattactaaagttttagcattagtttttacactacttaaaatccaattaaacaaaaaatcgctactcaattgagtaacgattttttctatccatccagttcaacgccttgtaagtccttcatcttgctataaaccgcgccacgttgacttgaatcaaactccagaataagcatatctccgccgcgaattacggtttgaccatttggtatgatctcatctccatcgcggtgaattgttcttaccctagtatcaaccggccattgaacctcagaaatggttttatcaaccagtctactgctctcatagaccggcagagccattgtatcagcctgaccagtatagttagccttatggtcactactcttgtccatagcggctgctagaagcccgtagataggcttaccgccaagaagttcatcaactaataacgcaatgaaggccaccacagctaatggcatcaagtgaagtaaggaccctaccatctcagtaattaagataatcgccgtaaatggtgcacgaatgattgctgcaaaatatcctgccattgaaaaaatcactaggttaactactaaacgctgcggtaacaagcctaactgtaccatcatcagtccataagttgcaccaatcaaagcgcccattgtcaaaattggcaggaagataccactaggaagacctgaatcataagcaacaatggagaaaacaattctcatgacataatagaaggctagcatccctacaatgccccaacctgttttagtgattatattcggcaatgccagaattaaccgattacctggaccggtgattaatggccaaaagtaagcaatcgggattaatattgccaaaggaataagtccatgcagccaacgaggtaaaatggtgattttagcatagaccttctttaaactaaataaaccaactttatataaatgacccaataagcctaataaaatccctaagataagcaagtgccagtacaacgaaatcggaaatgaatagttatattgaattgctagggcgtgacgaatgccaaacaagtttgaaacgacaaagtttgaagcaattgcgccagctaaagcattcatccaaactaatggtgaaaagttatggaatacttcttctaagacaaacaaggcaccactcaaaggagcgccaaaagcggcagacaaaccacttgaagcccctgttgcaagcagaattctagtttttaatttgttctgcttgcatccctgagcaacaccttgaccaattgtcgagcccagctgcaatgatggtccttctggtcctaggaatagccctgtgccgataaccaagataccaccgattaatttccgccataaaattggaaaccattgtagtgatagcttcccttgcagttgcaattttacttctggaataccagaaccaccaacatggggatattgtttaacaaaataaccagcaattaccgctaccgcaataaagccaatgataatcgcaataaaccacaacggattctggtgcgctaattgaaacaagtataaccaaaaaccagatgtcttttcgattccaaatctaaataaaccaactactacgccggtacatattccgacaagtagtgcttggagcaacagtttaatattagttctgtttgcctcgtctttcattactttctccctcacaataaaaaaaacgtgtcacaaactattgtacaacaaaaagccagctagaaatgttctaactaacttttttgtttcatgtgaaactaattatttttcttcataccattcggtgtggaagacgccttcacgatcatttctaaggtaagtgtgcgcaccgaagtagtcacgttggccttggatcatattagctggcaagtttggattaaagattgattccaaccagttaagagctgcgctcaaagttggagttggcacaccacacttagtagcaaattcaactgacttacgcaaagctggcaagttttccttcatcaagccgcggaaataatcgtcttggaataggttcattagcttgccgttcttgtcataggctttttcaatatccttaagcattgcggaacgaatgatacaacctgcttcccaatcttgagcaattgacttgtatcttaagtcccaatcataagcttcagcagccattgtcaattgttggaaaccttgagcataggcaacagcttgggctaattgcaatgatttttcgaatacgtcaaccatatcatcaggaatttcaccattgtattcaaacttagttggtttaacgcccttttcaattgtcaagtgtgcttgcttactcatgaaacgtgccattacagcctcggctaccaccgttacaggagcgccaagtgcaacaccatcttcgagcatccagttaccagtacctttgtatgaagcaacgttcaaaatgtgatcgattacgtgatctggcgttaaatcatctttttgtgccaaaacctttgaagtgatttcgctaagatatgcttctaccttaccataattccatttatcaaaaatttctgacatttcatcatcgctcttgtgagcaacgtcacggagtaagttgtaaacttctgaaaattcctgcataataccgtattcgataccattgtgcaccattttgacatagtgaccagcaccttcaggtcccatgtagtagacacatggcttgccttcagtattcttagcggcaatagcttcaagaattggagcaacttccttataggctggttcatcaccacctggcatcaaagctggaccattcaaggcaccctcttcaccaccggaaacacccataccaataaaatgaatgccgtgcttttccatttcgtggaaacgacggttagtatcgtgataatttgagttaccaccatcgattaaaatatcgcctttatccaaaagcggcagcaatttttgcaaagtttggtccactggatcgcctgccataatttgaatcaaaatcttgcgtggcttttcaagtgagtttacgaactcttcccaggtgtagcaaggctttaatttatcatcttcatattttgcgaaagcatcaacttctggtttgtcgattgagaaaccggaaacggagaagccgtggtttctaacattcaaagcaaggttcttgcccataacagacaaaccgataacgccgaattgttgcatgtttattaattcctccattaatcaaagttcatcaagtattattatacgttctagcacgcaaaaaagcgaaaccaaaaggttccgctttttaaaatctagttaataatttttttgttattgggtaaaagtgtttcacacactgctcggtaatatttcctaggaaatattacttttattgatcaataccccaaagtaaaatgttaaatgctaatggtaatgtatccatcctttttagcctgttttaaagatgctagaacaaatttacgttgttgaccctttagctttttggctactttaacagctaaattaaagtcatactcgttttttctaatagcattttttgataactatctttgcccacagaaataggttgagaatcggagtttacagttacaatgtagctccacttgctaagtcgaggaatatttttaattgttatagctttatcaaacttagctactgcagttgaattgctgttgtctgcagcgttggcagtgacagacgatgctgaaaataatgctgcgagtaaagcagtagcaagtaaactaattagagcttttttagatttcataatttagcatctttttacacatagtgcttattggctaataagcattaattcatatccaacactgtctattataagcatctgtattctatttactagccaacagactattttatatttaaaatcgtatataaaatggggctatttcccaggaaatattttcccatacaaaaaagcgggacaaacgtctcgcttctttataattactcaaccaaattagtgttgtgaagcacctgaaaccgtatcaggagcaggatcctcttctggttctgattcttcatgttgagatgcacctgttgcagcgtcagcttctaagccgtacttttctgcaaagtaactgaatggcttcaagtcttcagcttgatacttcttgacaaaggctgggtcgtcaagtgagttcaattcagttgagtaaggcatttcgtgagtgtacttgacgtcgatcaacattggaccgtccatcttcttgaattcgtcgacagcatcttcgaattccttcttggtgcgaaccgttacacccttaacattcataccttcagcaacctttgaccagtcgttgtcaggaatgataacacctgataatggttggtgagattcatcttcttgttctgcttgaatgtaacctagtgtttcgttagtaaatacaatattcaaaacatgcatgttgtaacgagccatagtaagaagttcttggttcatcatagcaaaaccaccgtcaccagctaattgccatacttcacggtctgggtaaacagttgctgcagtaagagcagctggagcaccataacccatagttgcgtgcaagcctgaagtagtccacttttgatcatcatgcaagttcaaaagacggcatgagtcaacgttaacgttaccaacatcaatagcaaagatggcgttgtcatcagccttcttgttgataacatcccagattggttcaggacgtacaggcatttcatctgagttcttaaagcttgcttgccatgcatcccagttctcacggtctgcaatagcagccttgtaaagtggtgattcgctacgttcttcaccagcgtcaataattgctctcaaagccttcttagcatctgcaagcattgaaacatcagttgagtgacgcttaccaaacttagctgaatcaacatcaatttggataaccttagcgttcttagggaaccataaaactgagaatggtgagttgttacctacccaaacaactaagtcagttgcgctttggacttcttgagcagccttaggtccgatacggccgatagtacccatgtatgctgggaatttgtcttctactacacccttgcctaagtatgatgacataataggggtcttgaacttttcagcaaattccttaacttcttcaccagcatcctttgcacctaaaccaatgtacatggttgggttcttagcttctttcaaaagcttaacagcttcttcaactgaagccttagttggtgctggataattgtctgctggatgagcatccttgtttacacggaaggtgtcatcaatcttttgccaaccgtagtccttaggaataatgataactgcaggaccctttcttgcgtaggcttgacggatagcttcatcagttaaaattggaatttgttcagcggtcttagcttggcggcaccaaacactagcgttcaagaaccacttgtcttcatcaaaagcttggaagaagtcaatatcttgacggctagttggaacgttagcaacaattgctaccattggagtcttgtcaaacttagcatcatacaaaccattgaataagtgggcagcaccaggaccagctgaaccgaaacatacacccaacttaccagttaacttatattctgcagaagcagctaaagcaccagcttcttcgtgacgtacttcaataaatttcatcttatctctaaagtcatagatagcgttcatacttgagtcgaatgaaccacctgggaaaccgtagatatgatcaattccccaatcgtaaataactttaagcattgcatcagaaccattaatttttgtcatataagtgcatctccttaacttttgttctttcataatgtattaaaacactttttttcacatttgcaaaccgataaaatcaccgttattacgcaaatgaaaacgcttttgtaataataatcacttcacaagctttaccaaattcaatatctcaaaaagctgaatggtagcgttttatattgtgatttgatgaacattattatactaaatttcacttattttatgtatattcattgttacttatagtaaaaatttaagaaaaaattttttacaatttatttcatagctatccaatttagaaaaacgttattttataattttgcgcataaaaataacgtagaatactattcctacgctatttttgtgctattctactttttcactctagagtaacgcccattttgaatgtaaacactcaagattgccaagtcagctgggttaactcctgaaattcgttctgcttgagctaaagtttcaggacgaattttttcaaatttttgccgtgcctcagtagctaaaccttcgatttggtcataatcaatatctgctgggatttttttggcttcttgtctctttaagcgagcaattctggtttcttctttcttgatatagccagcatacttgataccaatctcaacttgttctttaacgtaacgatcgcctggaactttttcaccagttaaccgttcaatatcagcaatagtaacattagggcgacgcaagaaaacatcggccttaacaccggccttcattggttcctgaccaatactttgcaaaaattcctgcacctcatcagttaaatgaaccgtaatttcatgcagtctcgtctttgcatcttcaatcgcatgcttcttttcttcaaatcgtgcgaagcgttcgtcagaaattaagcccagatcatgaccatattcagtcaaacgcaagtctgcgttatcattgcgtaaaatcaaacgatattctgctctactagtaagtagacgatatggttcattcgtccctttggttaccaagtcatcgattaacacgccaatgtaagcatcgttacggcctaaggtaaatcctggcttatcttgagcagataatgccgcattaattcctgcaattaaaccttgaccagctgcttcttcataacctgatgttccattcatctggcctgcagtaaataaatgctttacgtttttggtttccaaagtatgcttcaattgccatggttcaaccacatcgtattcaattgcatatcctggtcgcatcatttccgcatgttctaatcccgcaacagaatgaatcatctttaattgaatttcttctggcattgaagttgaaaagtcgcctacataaacttccttggtagtctttccttctggttcaaggaaaatttggtggcgatccttatctgcaaagcggacaactttgtcttcaattgaaggacaataacgtgggcctacacccttgataattccagagaacatcggtgcacggtcaagattgtttctaataatcgtgtgtgtggttggattagtataagtcatccaacaagaaatttgtttttgtaaataatcttcatcacgactttcatatgaaaagtgccgtgggattttatcaccaggttcttcctcagttttagaatagtcaattgtattgccgttaacacgtggaggagtaccggttttaaaacgacgcagcttaaaacctaacttttctagattttccgacagcttaattgaaggagtagtgttatttggacctgaagaataagtcaattccccaataataattttaccgcgagccgctgtacctgtagtcaaaacaacgcttttagcatgatacttcgcaccagtattggtaatcacacctttgcagacgccatcttcaactaccaattcatccacgatagcctgacgcaaggtcaagttgggcgtattttcgatcgtatccttcatgtgttcatgatattgccacttatcagcttgagcacgtagcgcacgcacagctggccccttacccgtatttaacatccgcatttggatataggtagcatcaatgttctttcccatttgaccacctaaagcatcaatctcacggacaactgtccctttagctggtccaccaacagatggattacatggcataaaggccaccatatccaaaccaatcgtaaccagcaaagttttttgtcccatgtgggcacttgccaacgcagcttcacatccagcatgcccagcaccgacaacgattacatcatattcatttgaatcatatgttttaaccattttcatcctactttcctaaacagaattgactaaataattgcgtgattaattcatctggggcactttcaccagtgatttcacctaaagtatcccaagcaccagtaaaatcaatttgtgcaatatcaacagggacgccatcttcaactgcttgaattacatcttccaattctttcttagccttatgcaataaggaagcttggcgttgattggttaccataatttgatcattagaattttcaatcccagcaaaaaatagcttattaatcaattcttcaagcgcatctaagttttgttctttcaaaatcgaagttgaaataacatcactacccgttagtttctccatctcagtagttgttattttttgacctaaatccgacttatttaagatcacgattcgcttcttgtcctttgttgcttcaattaaggcttgatcttcagctgttaatgcttgactagcatcgattaacaacaagaccagatctgctcgctccaaggccttttttgatctttctacaccaattttttccaccttatcttcagtgtggtggattccagcagtatcaattagctctagcggtactccttttacagacacatattcttctaacgtatcacgcgttgttccagccacatcggtcacaatcgctttgtcgctttgagtcagataattcaataaagaagactttcccacattaggacgaccaacaattgcagtagccaaaccattgcgcaagatttttccttcttgtgctgtcttcaataagcgattaattttatcaattactgatctagatgtgtctgccatctgttttgcggtaacagtatctgcatcatactctggataatcgatattaacctcaacgttagccaaagtattcagaatttcctgccgcattgcctgaatcttgtgtaacaatccaccagctaattgaccaacagccacttgtcgtgccttatccgtcttggcccgaacgatatccatcacactctcagcttgagttaagtcaattcgtccgttcacaaaagcacgtttagtaaattcaccaggatcagccattcgcgcaccgtgactcagcaacaattgtaaaatatgattagttaccacgattccgccatggcaattgatttctacaatatcttcacgtgtaaaggtcttgggcgcacgcagcactgtcaccattgcttcatcaatcgttttcccagtatccggatcgataatatgaccatagtgaatagtatgtgtcggcaccttgcttagatcttcgcctttaaaaacctcatcagcaatcttaattgcatcctcaccagacattcttacgattgaaattccgccttcaccgatgggggttgaaattgctgcaatagtatcgaactctgtcaaagtttgagccataattcttcccttttctcaataaaaaaagcgcattataccaccacgaataaccatgatggataaagcactttgactactttatctaaaaatcattttagactaatattcttttatttctttttgcgtcctaaacgcttgtaagcccttcttagtttacgtttgcgttcacgctcagcctcagcctttgcttcttgctctcttctatatttaatagggttttgcaagataaaggtttgaagcgcctggaacaagttggaaattacccagtaaagtgtaatagctgactggaagtttaaggccatcacaccaaccatgatagacattccgtacatcattactttggtcattccattttgcgatgattttggcgtcgataattgactaatatacgtcgataagaacgtaaagatcattgctaaaataggcatgatgtaatatggatcgggcttgcttaaatccatccataagaagcgcccagtttgtaactgcggtgtacgtaaaatcgcaccatacagtgcatacataactggcaactggatcaggacaggcaaacatccagtataaggatttacgcctgcttctttataaagcttgttagtttcttgttgtaataatgttcttgattcagtgtcacgtcctggatatttcttacgcaactcattaatttgtggttggatgctttgcatcttagtagtacttcgaattgaaatagcattcaaaggtactaagatgacacgaacaatgacggtgaagacaataattgcccagccataactgttccccattaacttagctagccacaaaataaaagctgacatgtaataaacgatccaacggtcccaccaattaccacttgtatgtgagattggcgttgcttgaccatttgctcccgtagtagcacatcctgtcaatacaacagcaagtattgctactgctaagactgcaagaagacgtttgacatttctcttggtcagaatgtccttcaatctatttttcctcaactttatctggcatttcttcaataatatgagctaacgataatgcgtgaagcaagtttttacgcacctgagccatattaaaatcgcgagcataaggtcgcgtaatgactaaaaaatcaacatgcggattaatctgcaatttttcttcatcaatcacggcccgaatataacgcttgagtcgattacgtgcgactgcggtatgaccaacctttttgcccacagaaattcctactcgaaagtgtttattttctgttttttctaccttataaatgacaaaagctcggttagcgactgagtcgccagattcgaaaacttgctggaaatctttttcagattttactcgataagactttctcaaaacgtttcattccactctagtagactaaaaaaaccactgggattcagtggtttaagcagataagacttttctaccttttgcacggcgtcttgctaaaaccttacggccatttgatgtgctcatacgcttcataaaaccgtgaacacgtgaacggtgacgcttcttaggttggtaagttctcttagttgtcatattaaactgcacctccataaatttttgtgccaattgcacaatttcttattaaggatagcacgaaaagccataaaaaccaagtattttaagaaaaaaagactcctgaattgtcaaattaagtgcaacagttaggctatgaaggaacgtattgcttgaagagttctgctgtgtgatattggaggattcgacgatgtttgcggttaatggcatcagttgcctgttgaacataagcagctgacttatctttcatgcttttgcccttagggaagaattgacgcagaagtccattgcagttctcatttgtgcctctttcccaaggagaatatggatgagcaaagtagatctgacatcctttgattttggtcatatccgcaaactcagaaccattgtcaaacgtaattgatttaaaccaattaggatgtctgtcaatctccttttgaagcagtctttgacaagtactggcccgatagtcaggaattttgataacaacctcaaaacgagtggttctttcagtcagtgtcattaaggcaggttgatttttacgtctgacgcctttaaccaaatcgccttcccagtgcaggggaacttttctgttttcaacttctttaggccgctgttcaatcgaattgccaagattctttttatgcggagcatggccaccatgactatgatggcgtttgtttctgcgtcttttaagcttcattggcaggtcgatattgcttatatccagcaatccttgatcaatataacgatagacagtgggcgtgctaggacatggataatttggcataatcctgtgaaattcaccaacgaattcatcaatgctagtggcatcaaatttggctttaaagcgtctgcttagcattctgaaaaagacggcatagtgttgcagtggattacacttatagcagtttctgcggcgcttttcatgataaatttgtgcagtatcagcgtaatagtgctcatacaagacatagctgctgtctctttgcaggacactgcctcgtctaatttcacggctgatagttgatttatgacagcctacttcttgagcgatagcagtgcaggaggttatgccagaatcaagcagagcttgaatttgtccacgttgttcgctgttcaattgatgataatgcttggaaatgctagaatttgagttggtcatgaagatcttcctttcttgatttttggtcacatcaagtttaggtcttcatggcctttttgtttaacacttagtgttgcacttcaattttaaattcgggagaaaaaaagacttttaaatcccgtgaatattttctaagaattcattgtttttcatgtggataaaaaataaaatatttttcttacgtataatttccacaagataattcccaacgttttccacaactcacatggtgttaaaaacttaattcacaccatgtggataacgcatatggtattttacctcaagtattgatagaatagtatccataattcacagctgtactgtgcataaattaacagttttgctcttatcatgtcaaaatgtacatatcactttaatagttatcaacaggctgtgtactttgttggtttctttttcacctgtggaaaaccagttaagtaaatggtaaaataaatttgctttttactaactgggggaatgtaca
